(19) United States
(12) Patent Application Publication
(10) Pub. No.: US 2010/0120105 A1
(43) Pub. Date: May 13, 2010

(54) CARBON PATHWAY OPTIMIZED PRODUCTION HOSTS FOR THE PRODUCTION OF ISOBUTANOL

(75) Inventors: Larry Cameron Anthony, Aston, PA (US); Michael Dauner, Claymont, DE (US); Gail K. Donaldson, Newark, DE (US); Brian James Paul, Wilmington, DE (US)

Correspondence Address: E I DU PONT DE NEMOURS AND COMPANY;LEGAL PATENT RECORDS CENTER, BARLEY MILL PLAZA 25/1122B, 4417 LANCASTER PIKE, WILMINGTON, DE, 19805, US

(73) Assignee: BUTAMAX (TM) ADVANCED BIOFUELS LLC, Wilmington, DE (US)

(21) Appl. No.: 12/606,410

(22) Filed: Oct. 27, 2009

Related U.S. Application Data
(60) Provisional application No. 61/108,680, filed on Oct. 27, 2008.
(60) Provisional application No. 61/108,684, filed on Oct. 27, 2008.
(60) Provisional application No. 61/108,689, filed on Oct. 27, 2008.

(51) Int. Cl. C12P 7/04; C12N 1/00; C12N 1/21; C12N 1/19

(52) U.S. Cl. 435/157; 435/243; 435/252.3; 435/252.33; 435/252.34; 435/252.31; 435/254.23; 435/254.22; 435/254.21; 435/254.2

(57) ABSTRACT

A microbial host cell is provided for the production of isobutanol. Carbon flux in the cell is optimized through the Entner-Doudoroff pathway.

### CROSS-REFERENCE TO RELATED APPLICATIONS

[0001] This application is related to and claims the benefit of U.S. Provisional Application Nos. 61/108,680; 61/108,684; and 61/108,689, all filed on Oct. 27, 2008, the disclosures of which are hereby incorporated by reference in their entirety.

### FIELD OF THE INVENTION

[0002] The invention relates to the field of industrial microbiology. More specifically a microbial production host for the production of isobutanol is provided wherein the host is genetically modified to maximize carbon flux through the Entner-Doudoroff pathway.

### BACKGROUND OF THE INVENTION

[0003] Butanol is an important industrial chemical, useful as a fuel additive, as a feedstock chemical in the plastics industry, and as a foodgrade extractant in the food and flavor industry. Each year 10 to 12 billion pounds of butanol are produced by petrochemical means and the need for this commodity chemical will likely increase.

[0004] Methods for the chemical synthesis of isobutanol are known, such as oxo synthesis, catalytic hydrogenation of carbon monoxide (Ullmann's Encyclopedia of Industrial Chemistry, 6^{th} edition, 2003, Wiley-VCHVerlag GmbH and Co., Weinheim, Germany, Vol. 5, pp. 716-719) and Guerbet condensation of methanol with n-propanol (Carlini et al., J. Mol. Catal. A: Chem. 220:215-220 (2004)). These processes use starting materials derived from petrochemicals and are generally expensive and are not environmentally friendly. The production of isobutanol from plant-derived raw materials would minimize green house gas emissions and would represent an advance in the art.

[0005] U.S. Patent Application Publication No. 20070092957 describes a variety of production hosts and methods for the biological production of isobutanol.

[0006] Recently Atsumi, S., et al., (Nature, 451:86-90, 2008) described development of a recombinant E. coli strain which produced isobutanol in concentrations up to 300 mM. This recombinant E. coli was disrupted in genes adhE, IdhA, frdBC, fnr, pta and pflB and contained two plasmids bearing an isobutanol biosynthetic pathway similar to that described in U.S. Patent Application Publication No. 20070092957. These plasmids carried an acetolactate synthase, an acetohydroxy acid reductoisomerase, an acetohydroxy acid dehydratase, a 2-keto acid decarboxylase and an alcohol dehydrogenase

[0007] Enzymatic pathways useful for the production of isobutanol have specific co-factor requirements. Certain of these have the need for one NADH and one NADPH for every 2 molecules of pyruvate processed in the pathway to isobutanol. In many microbial systems glucose is metabolized to pyruvate via one of three glycolytic pathways known as the Entner-Doudoroff pathway (EDP), the oxidative pentose phosphate pathway (oxidative PPP) and the Embden-Meyerhof pathway (EMP). One of the challenges in designing a production host that efficiently produces isobutanol is to optimize pyruvate production from glycolytic pathways so that the co-factor requirements of the isobutanol biosynthetic pathway are met. Neither the oxidative pentose phosphate pathway nor the EMP typically produces the required co-factor balance. However, glucose metabolized via the EDP can produce one NADH and one NADPH for every 2 molecules of pyruvate.

[0008] Yeast has been transformed to express phosphogluconate dehydratase and 2-keto-3-deoxygluconate-6-phosphate aldolase to allow fermentation of sugar via the Entner-Doudoroff pathway (EDP). The use of such genetically modified yeast for use in alcoholic fermentations such as beer, cider, wine was disclosed in Publication WO1995025799A1 and U.S. Pat. No. 5,786,186. Production of an L-amino acid by a Gram negative bacterium also was increased by overexpressing the 6-phosphogluconate dehydratase and 2-keto-3-deoxy-6-phosphogluconate aldolase enzymes of the EDP in U.S. Pat. No. 7,037,690.

[0009] It would be an advance in the art to provide an isobutanol producing host having carbon flux optimized through the EDP, however, there are no reports of such flux considerations in prior art.

### SUMMARY OF THE INVENTION

[0010] Provided herein are recombinant microbial host cells comprising a functional or enhanced EDP and an isobutanol production pathway wherein said functional or enhanced EDP provides for increased isobutanol production as compared to the same host cell without said functional or enhanced EDP.

[0011] Also provided herein are microbial host cells wherein the functional or enhanced EDP is provided by expression of one or more heterologous genes that encode functional EDP pathway enzymes or up-regulation of one or more endogenous genes that encode enhanced EDP pathway enzymes, or both, and one or more modification to said host cell that provides for increased carbon flux through the EDP or reducing equivalents balance such that the cofactors produced during the conversion of glucose to pyruvate are matched with the cofactors required for the conversion of pyruvate to isobutanol, or both, whereby isobutanol production is increased as compared to the same host cell without said one or more modification that provides for increased carbon flux through the EDP or reducing equivalents balance, or both. In some embodiments, said one or more modification to said host cell that provides for increased carbon flux through EDP or reducing equivalents balance, or both, is one or more genetic modification selected from the group consisting of: a) a disruption in the expression of at least one enzyme of the EMP; b) a disruption in the expression of at least one enzyme of the PPP; and c) a modification in any one of EDP, EMP, or PPP such that cofactors produced during the conversion of glucose to pyruvate are matched with the cofactors required for the conversion of pyruvate to isobutanol.

[0012] Microbial host cells provided herein can further comprise: i) at least one gene encoding acetolactate synthase for the conversion of pyruvate to acetolactate; ii) at least one gene encoding ketol acid reductoisomerase for the conversion of acetolactate to 2,3-dihydroxyisovalerate; iii) at least one gene encoding an acetohydroxy acid dehydratase for the conversion of 2,3-dihydroxyisovalerate to α-ketoisovalerate; iv) at least one gene encoding valine dehydrogenase or transaminase for the conversion of α-ketoisovalerate to valine; v) at least one gene encoding a valine decarboxylase for the conversion of valine to isobutylamine; vi) at least one gene encoding an omega transaminase for the conversion of isobutylamine to isobutyraldehyde, and (vii) at least one gene encoding a branched chain alcohol dehydrogenase for the conversion of isobutyraldehyde to isobutanol.

[0013] Microbial host cells provided herein can further comprise: i) at least one gene encoding acetolactate synthase for the conversion of pyruvate to acetolactate; ii) at least one gene encoding ketol acid reductoisomerase for the conversion of acetolactate to 2,3-dihydroxyisovalerate; iii) at least one gene encoding acetohydroxy acid dehydratase for the conversion of 2,3-dihydroxyisovalerate to α-ketoisovalerate; iv) at least one gene encoding a branched chain ketoacid dehydrogenase for the conversion of α-ketoisovalerate to isobutyryl-CoA; v) at least one gene encoding an acylating aldehyde dehydrogenase for the conversion of isobutyryl-CoA to isobutyraldehyde; and vi) at least one gene encoding a branched chain aldehyde dehydrogenase for the conversion of isobutyraldehyde to isobutanol.

[0014] Microbial host cells provided herein can further comprise: i) at least one gene encoding acetolactate synthase for the conversion of pyruvate to acetolactate; ii) at least one gene encoding acetohydroxy acid reductoisomerase for the conversion of acetolactate to 2,3-dihydroxyisovalerate; iii) at least one gene encoding acetohydroxy acid dehydratase for the conversion of 2,3-dihydroxyisovalerate to α-ketoisovalerate; iv) at least one gene encoding branched-chain a-keto acid decarboxylase for the conversion of α-ketoisovalerate to isobutyraldehyde; and v) at least one gene encoding branched-chain alcohol dehydrogenase for the conversion of isobutyraldehyde to isobutanol.

[0015] In some embodiments, the functional or enhanced EDP is provided by expression of at least one recombinant DNA molecule encoding an enzyme of the EDP selected from the group consisting of a) glucose-6-phosphate dehydrogenase; b) 6-phosphogluconolactonase; c) phosphogluconate dehydratase and d) 2-dehydro-3-deoxyphosphogluconate aldolase.

[0016] In some embodiments the disruption in expression of at least one enzyme of the EMP is a disruption in expression of at least one enzyme selected from the group consisting of: a) 6-phosphofructokinase, b) fructose-bisphosphate aldolase and c) glucose-6-phosphate isomerase.

[0017] In some embodiments, the host cell is a member of the genera Clostridium, Zymomonas, Escherichia, Salmonella, Serratia, Erwinia, Klebsiella, Shigella, Rhodococcus, Pseudomonas, Bacillus, Lactobacillus, Enterococcus, Alcaligenes, Klebsiella, Paenibacillus, Arthrobacter, Corynebacterium, Brevibacterium, Schizosaccharomyces, Kluyveromyces, Yarrowia, Pichia, Candida, Hansenula, or Saccharomyces. In some embodiments the host cell is E. coli, S. cerevisiae, or L. plantarum. In some embodiments, the host cell is E. coli and wherein the host cell further comprises downregulation or deletion of soluble transhydrogenase activity.

[0018] In some embodiments the host cell comprises a disruption in at least one of the following genes: pfk1, pfk2, fba1, gnd1, gnd2, pgi, pfkA, pfkB, fbaA, fbaB, gnd, pgi, sthA, PGI1, PFK1, PFK2, FBA1, GND1, or GND2.

[0019] In some embodiments the host cell is S. cerevisiae and the PFK1 gene encodes 6-phosphofurctokinase having the amino acid sequence as set forth in SEQ ID NO: 172; the PFK2 gene encodes a 6-phosphofructokinase having the amino acid sequence as set forth in SEQ ID NO: 174; the FBA1 gene encodes a fructose-bisphosphate aldolase having the amino acid sequence as set forth in SEQ ID NO: 186; the GND1 gene encodes a 6-phosphogluconate dehydrogenase having the amino acid sequence as set forth in SEQ ID NO: 148; and the PGI1 gene encodes a glucose-6-phosphate isomerase having the amino acid sequence as set forth in SEQ ID NO: 160. In some embodiments, the host cell is L. plantarum and the pfkA gene encodes a 6-phosphofructokinase having the amino acid sequence as set forth in SEQ ID NO:176; the fba gene encodes a fructose-bisphosphate aldolase having the amino acid sequence as set forth in SEQ ID NO:188; the gnd1 gene encodes a 6-phosphogluconate dehydrogenase having the amino acid sequence as set forth in SEQ ID NO:152; the gnd2 gene encodes a 6-phosphogluconate dehydrogenase having the amino acid sequence as set forth in SEQ ID NO:154; and the pgi gene encodes a glucose-6-phosphate isomerase having the amino acid sequence as set forth in SEQ ID NO:162. In some embodiments, the host cell comprises a heterologous glucose-6-phosphate dehydrogenase gene encoding a polypeptide having the amino acid sequence as set forth in SEQ ID NO:128. In some embodiments, any endogenous gene encoding a polypeptide having glucose-6-phosphate dehydrogenase activity has been disrupted or deleted. In some embodiments, the host cell comprises a 6-phosphogluconolactonase gene encoding a polypeptide having the amino acid sequence as set forth in SEQ ID NO:106.

[0020] Provided herein are recombinant microbial host cells comprising an isobutanol production pathway and at least one of the following: a) at least one recombinant DNA molecule encoding an enzyme of the EDP; b) a disruption in the expression of at least one enzyme of the EMP; or c) a disruption in the expression of at least one enzyme of the PPP; wherein production of isobutanol by said host cell is enhanced by at least 10% as compared to the same host cell without one of (a)-(c).

[0021] Also provided are methods for improved production of isobutanol comprising contacting a microbial host cell provided herein with a fermentable carbon substrate for a time sufficient for isobutanol to be produced. In some embodiments, the fermentable carbon substrate is from lignocellulosic biomass and comprises one or more sugars selected from the group consisting of glucose, fructose, sucrose, xylose and arabinose. In some embodiments, the relative flux through at least one reaction unique to the EDP is at least 1% greater than that in the same host cell without functional or enhanced EDP. In some embodiments, the relative flux through at least one reaction unique to the EDP is enhanced by at least about 10%. In some embodiments the yield of isobutanol is greater than about 0.3 g/g.

[0022] Provided herein are methods for the production of isobutanol comprising a) providing a microbial host cell as provided herein; and b) contacting the host cell with a fermentable carbon substrate under anaerobic conditions. In some embodiments, the host cell is E. coli and endogenous pyruvate formate lyase, fumarate reductase, alcohol dehydrogenase, and lactate dehydrogenase activities are downregulated or disrupted.

[0023] In some embodiments, the yield of isobutanol is greater than or equal to about 0.3 g/g, in some embodiments, the yield of isobutanol is greater than or equal to about 0.35 g/g, and in some embodiments, the yield of isobutanol is greater than or equal to about 0.39 g/g.

In some embodiments, the host cell is S. cerevisiae and endogenous pyruvate decarboxylase activity is downregulated or disrupted. In some embodiments, the host cell is L. plantarum and wherein endogenous lactate dehydrogenase activity is downregulated or disrupted.

### BRIEF DESCRIPTION OF THE FIGURES AND SEQUENCE DESCRIPTIONS

[0024] FIG. 1 depicts isobutanol biosynthetic pathways.

[0025] FIG. 2 depicts the interaction between the EDP, the oxidative PPP and the EMP.

[0026] FIG. 3 illustrates genes that can be up-regulated (circled) or down-regulated (crossed out) to enhance the EDP in an E. coli host cell.

[0027] FIG. 4 illustrates genes that can be up-regulated (circled) or down-regulated (crossed out) to enhance the EDP in Saccharmoyces cerevisae host cell.

[0028] FIG. 5 illustrates genes that can be up-regulated (circled) or down-regulated (crossed out) to enhance the EDP in Lactobacillus plantarum host

[0029] The following sequences conform with 37C.F.R. 1.821-1.825 (“Requirements for Patent Applications Containing Nucleotide Sequences and/or Amino Acid Sequence Disclosures—the Sequence Rules”) and are consistent with World Intellectual Property Organization (WIPO) Standard ST. 25 (1998) and the sequence listing requirements of the EPO and PCT (Rules 5.2 and 49.5 (a-bis), and Section 208 and Annex C of the Administrative Instructions). The symbols and format used for nucleotide and amino acid sequence data comply with the rules set forth in 37C.F.R. §1.822.

TABLE 1
SEQ ID NOs of the Genes and Proteins of
Various Isobutanol Pathways

| | SEQ ID NO: | SEQ ID |
|---|---|---|
| | Nucleic | NO: |
| Description | acid | Peptide |
| Bacillus subtilis alsS (acetolactate synthase) | 1 | 2 |
| Bacillus subtilis alsS (acetolactate synthase), | 254 | 2 |
| codon optimized | | |
| Klebsiella pneumoniae budB (acetolactate | 3 | 4 |
| synthase) | | |
| Lactococcus lactis als (acetolactate synthase) | 5 | 6 |
| Escherichia coli ilvC (acetohydroxy acid | 7 | 8 |
| reductoisomerase) | | |
| S. cerevisiae ILV5 (acetohydroxy acid | 9 | 10 |
| reductoisomerase) | | |
| Methanococcus maripaludis ilvC (Ketol-acid | 11 | 12 |
| reductoisomerase) | | |
| B. subtilis ilvC (acetohydroxy acid | 13 | 14 |
| reductoisomerase) | | |
| E. coli ilvD (acetohydroxy acid dehydratase) | 15 | 16 |
| S. cerevisiae ILV3 (Dihydroxyacid dehydratase) | 17 | 18 |
| M. maripaludis ilvD (Dihydroxy-acid | 19 | 20 |
| dehydratase) | | |
| B. subtilis ilvD (dihydroxy-acid dehydratase) | 21 | 22 |
| Lactococcus lactis kdcA (branched-chain alpha- | 23 | 24 |
| ketoacid decarboxylase) | | |
| Lactococcus lactis kivD (branched-chain α-keto | 25 | 26 |
| acid decarboxylase), codon optimized | | |
| Lactococcus lactis kivD (branched-chain α-keto | 189 | 26 |
| acid decarboxylase) | | |
| Salmonella typhimurium (indolepyruvate | 27 | 28 |
| decarboxylase) | | |
| Clostridium acetobutylicum pdc (Pyruvate | 29 | 30 |
| decarboxylase) | | |
| Saccharomyces cerevisiae YPR1 (2- | 31 | 32 |
| methylbutyraldehyde reductase) | | |
| S. cerevisiae ADH6 (NADPH-dependent | 33 | 34 |
| cinnamyl alcohol dehydrogenase) | | |
| E. coli yqhD (branched-chain alcohol | 35 | 36 |
| dehydrogenase) | | |
| Clostridium acetobutylicum bdhA (NADH- | 37 | 38 |
| dependent butanol dehydrogenase A) | | |
| Clostridium acetobutylicum bdhB Butanol | 39 | 40 |
| dehydrogenase | | |
| Bacillus subtilis bkdAA(branched-chain keto | 41 | 42 |
| acid dehydrogenase E1 subunit) | | |
| B. subtilis bkdAB (branched-chain alpha-keto | 43 | 44 |
| acid dehydrogenase E1 subunit) | | |
| B. subtilis bkdB (branched-chain alpha-keto acid | 45 | 46 |
| dehydrogenase E2 subunit) | | |
| B. subtilis lpdV (branched-chain alpha-keto acid | 47 | 48 |
| dehydrogenase E3 subunit) | | |
| Pseudomonas putida bkdA1 (keto acid | 49 | 50 |
| dehydrogenase E1-alpha subunit) | | |
| P. putida bkdA2 (keto acid dehydrogenase E1- | 51 | 52 |
| beta subunit) | | |
| P. putida bkdB (transacylase E2) | 53 | 54 |
| P. putida 1pdV (lipoamide dehydrogenase) | 55 | 56 |
| Clostridium beijerinckii ald (coenzyme A | 57 | 58 |
| acylating aldehyde dehydrogenase) | | |
| C. acetobutylicum adhe1(aldehyde | 59 | 60 |
| dehydrogenase) | | |
| C. acetobutylicum adhe (alcohol-aldehyde | 61 | 62 |
| dehydrogenase) | | |
| P. putida nahO (acetaldehyde dehydrogenase) | 63 | 64 |
| Thermus thermophilus (acetaldehyde | 65 | 66 |
| dehydrogenase) | | |
| E. coli avtA (valine-pyruvate transaminase) | 67 | 68 |
| B. licheniformis avtA (valine-pyruvate | 69 | 70 |
| transaminase) | | |
| E. coli ilvE (branched chain amino acid | 71 | 72 |
| aminotransferase) | | |
| S. cerevisiae BAT2 (branched chain amino acid | 73 | 74 |
| aminotransferase) | | |
| Methanobacterium thermoautotrophicum | 75 | 76 |
| (branched chain amino acid aminotransferase) | | |
| Streptomyces coelicolor (valine dehydrogenase) | 77 | 78 |
| B. subtilis bcd (leucine dehydrogenase) | 79 | 80 |
| Streptomyces viridifaciens (valine decarboxyase) | 81 | 82 |
| Alcaligenes denitrificans aptA (omega-amino | 83 | 84 |
| acid:pyruvate transaminase) | | |
| Ralstonia eutropha (alanine-pyruvate | 85 | 86 |
| transaminase) | | |
| Shewanella oneidensis (beta alanine-pyruvate | 87 | 88 |
| transaminase) | | |
| P. putida (beta alanine-pyruvate transaminase) | 89 | 90 |
| Streptomyces cinnamonensis icm (isobutyrl-CoA | 91 | 92 |
| mutase) | | |
| S. cinnamonensis icmB (isobutyrl-CoA mutase) | 93 | 94 |
| S. coelicolor SCO5415 (isobutyrl-CoA mutase) | 95 | 96 |
| S. coelicolor SCO4800 (isobutyrl-CoA mutase) | 97 | 98 |
| Streptomyces avermitilis icmA (isobutyrl-CoA | 99 | 100 |
| mutase) | | |
| S. avermitilis icmB (isobutyrl-CoA mutase) | 101 | 102 |
| Achromobacter xyloxidans sadB (butanol | 103 | 104 |
| dehydrogenase) | | |
| Vibrio cholera (KARI) | 212 | 213 |
| Pseudomonas aeruginosa PAO1 (KARI) | 214 | 215 |
| Pseudomonas fluorescens PF5 (KARI) | 216 | 217 |
| Saccharomyces cerevisiae (ILV3 gene) | 7 | — |
| Saccharomyces cerevisiae (ILV5 gene) | 9 | — |
| Lactococcus lactis subsp. lactis, ilvD | 109 | 110 |
| (dihydroxyacid dehydratase) | | |
| Bacillus subtilis ilvC (ketol-acid | 251 | 14 |
| reductoisomerase), codon optimized | | |

TABLE 2
List of SEQ ID Numbers for
Genes and Proteins of Various Reactions of the EDP

| | SEQ ID NO: | SEQ ID |
|---|---|---|
| | Nucleic | NO: |
| Description | acid | Peptide |
| Aspergillus niger | 117 | 118 |
| gsdA(glucose-6-phosphate dehydrogenase) | | |
| Aspergillus nidulans FGSC A4 locus_tag = | 119 | 120 |
| “AN2981.2 (glucose-6-phosphate dehydrogenase) | | |
| Schizosaccharomyces pombe 972h- | 123 | 122 |
| locus_tag = “SPCC794.01c”, chromosome III | | |
| (glucose-6-phosphate dehydrogenase) | | |
| Schizosaccharomyces pombe 972h- | 124 | 125 |
| locus_tag = “SPAC3C7.13c”, chromosome I | | |
| (glucose-6-phosphate dehydrogenase) | | |
| Schizosaccharomyces pombe 972h- | 121 | 126 |
| zwf1, locus_tag = “SPAC3A12.18”, | | |
| chromosome I (glucose-6-phosphate | | |
| dehydrogenase) | | |
| Escherichia coli K12 MG1655 | 127 | 128 |
| zwf (glucose-6-phosphate dehydrogenase) | | |
| Lactobacillus plantarum WCFS1 | 131 | 132 |
| gpd (glucose-6-phosphate dehydrogenase) | | |
| Saccharomyces cerevisiae | 133 | 134 |
| ZWF1 (glucose-6-phosphate dehydrogenase) | | |
| Azotobacter vinelandii AvOP | 194 | 195 |
| locus_tags = “AvinDRAFT_4462”, | 196 | 197 |
| “AvinDRAFT_8258”, “AvinDRAFT_4842” and | 198 | 199 |
| “AvinDRAFT_0719” (2-dehydro-3-deoxy- | 200 | 201 |
| phosphogluconate aldolase) | | |
| Pseudomonas putida KT2440 | 202 | 203 |
| eda (2-dehydro-3-deoxy-phosphogluconate | | |
| aldolase) | | |
| Pseudomonas fluorescens Pf-5 | 204 | 205 |
| eda (2-dehydro-3-deoxy-phosphogluconate | | |
| aldolase) | | |
| Zymomonas mobilis ZM4 | 206 | 207 |
| eda (2-dehydro-3-deoxy-phosphogluconate | | |
| aldolase) | | |
| Escherichia coli K12 MG1655 | 208 | 209 |
| eda (2-dehydro-3-deoxy-phosphogluconate | | |
| aldolase) | | |
| Zymomonas mobilis ZM4 | 135 | 136 |
| edd (phosphogluconate dehydratase) | | |
| Pseudomonas putida KT2440 | 137 | 138 |
| edd (phosphogluconate dehydratase) | | |
| Escherichia coli K12 MG1655 | 139 | 140 |
| edd (phosphogluconate dehydratase) | | |
| Escherichia coli K-12 MG1655 pgl (6- | 105 | 106 |
| phosphogluconolactonase) | | |
| Saccharomyces cerevisiae | 107 | 108 |
| SOL4 (6-phosphogluconolactonase) | | |
| (NP_011764.1) | | |
| Saccharomyces cerevisiae | 190 | 191 |
| SOL3 (6-phosphogluconolactonase) | | |
| (NP_012033.2) | | |
| Lactobacillus plantarum WCFS1 lp_2219 (6- | 111 | 112 |
| phosphogluconolactonase) | | |
| Zymomonas mobilis mobilis ZM4 | 113 | 114 |
| pgl (6-phosphogluconolactonase) (AAV90102.1) | | |
| Zymomonas mobilis mobilis ZM4 | 113 | 114 |
| pgl (6-phosphogluconolactonase) (YP_163213.1) | | |

TABLE 3
List of SEQ ID Numbers for
Genes and Proteins of Various Reactions of the oxidative PPP

| | SEQ ID NO: | SEQ ID |
|---|---|---|
| | Nucleic | NO: |
| Description | acid | Peptide |
| Aspergillus niger | 117 | 118 |
| g6pdh (glucose-6-phosphate dehydrogenase) | | |
| Aspergillus nidulans FGSC A4 | 119 | 120 |
| locus_tag = “AN2981.2 | | |
| (glucose-6-phosphate dehydrogenase) | | |
| Schizosaccharomyces pombe 972h- | 123 | 122 |
| locus_tag = “SPCC794.01c”, chromosome III | | |
| (glucose-6-phosphate dehydrogenase) | | |
| Schizosaccharomyces pombe 972h- | 124 | 125 |
| locus_tag = “SPAC3C7.13c”, chromosome I | | |
| (glucose-6-phosphate dehydrogenase) | | |
| Schizosaccharomyces pombe 972h- | 121 | 126 |
| zwf1, locus_tag = “SPAC3A12.18”, | | |
| chromosome I (glucose-6-phosphate | | |
| dehydrogenase) | | |
| Escherichia coli K12 MG1655 | 127 | 128 |
| zwf (glucose-6-phosphate dehydrogenase) | | |
| Lactobacillus plantarum WCFS1 | 131 | 132 |
| gpd (glucose-6-phosphate dehydrogenase) | | |
| Saccharomyces cerevisiae | 133 | 134 |
| ZWF1 (glucose-6-phosphate dehydrogenase) | | |
| Escherichia coli K-12 MG1655 | 105 | 106 |
| pgl (6-phosphogluconolactonase) | | |
| Saccharomyces cerevisiae | 107 | 108 |
| SOL4 (6-phosphogluconolactonase) | | |
| (NP_011764.1) | | |
| Saccharomyces cerevisiae | 190 | 191 |
| SOL3 (6-phosphogluconolactonase) | | |
| (NP_012033.2) | | |
| Lactobacillus plantarum WCFS1 | 111 | 112 |
| lp_2219 (6-phosphogluconolactonase) | | |
| Zymomonas mobilis mobilis ZM4 | 113 | 114 |
| pgl (6-phosphogluconolactonase) (AE008692.1) | | |
| Zymomonas mobilis mobilis ZM4 | 113 | 114 |
| pgl (6-phosphogluconolactonase) | | |
| (YP_163213.1) | | |
| Escherichia coli K12 MG1655 | 143 | 144 |
| gnd (6-phosphogluconate dehydrogenase) | | |
| Saccharomyces cerevisiae | 147 | 148 |
| GND2 (6-phosphogluconate dehydrogenase) | | |
| Saccharomyces cerevisiae | 149 | 150 |
| GND1 (6-phosphogluconate dehydrogenase) | | |
| Lactobacillus plantarum WCFS1 | 151 | 152 |
| gnd1 (6-phosphogluconate dehydrogenase) | | |
| Lactobacillus plantarum WCFS1 | 153 | 154 |
| gnd2 (6-phosphogluconate dehydrogenase) | | |

TABLE 4
List of SEQ ID Numbers for
Genes and Proteins of Various Reactions of the
EMP and Redox Metabolism

| | SEQ ID NO: | SEQ ID |
|---|---|---|
| | Nucleic | NO: |
| Description | acid | Peptide |
| Escherichia coli K12 MG1655 | 155 | 156 |
| pgi (glucose-6-phosphate isomerase) | | |
| Saccharomyces cerevisiae | 159 | 160 |
| PGI1 (glucose-6-phosphate isomerase) | | |
| Lactobacillus plantarum WCFS1 | 161 | 162 |
| pgi (glucose-6-phosphate isomerase) | | |
| Escherichia coli K12 MG1655 | 163 | 164 |
| pfkB (6-phosphofructokinase) | | |
| Escherichia coli K12 MG1655 | 165 | 166 |
| pfkA (6-phosphofructokinase) | | |
| Saccharomyces cerevisiae | 171 | 172 |
| PFK1 (6-phosphofructokinase) | | |
| Saccharomyces cerevisiae | 173 | 174 |
| PFK2 (6-phosphofructokinase) | | |
| Lactobacillus plantarum WCFS1 | 175 | 176 |
| pfkA (6-phosphofructokinase) | | |
| Escherichia coli K12 MG1655 | 177 | 178 |
| fbaB (fructose-bisphosphate aldolase) | | |
| Escherichia coli K12 MG1655 | 179 | 180 |
| fbaA (fructose-bisphosphate aldolase) | | |
| Saccharomyces cerevisiae | 185 | 186 |
| FBA1 (fructose-bisphosphate aldolase) | | |
| Lactobacillus plantarum WCFS1 | 187 | 188 |
| fba (fructose-bisphosphate aldolase) | | |
| Escherichia coli K12 MG1655 sthA | 257 | 258 |
| (soluble transhydrogenase) | | |

TABLE 5
List of SEQ ID Numbers of Primers

| | SEQ ID NO: |
|---|---|
| | Nucleic |
| Description | acid |
| GND H1 | 227 |
| GND H2 | 228 |
| GND Ck UP | 229 |
| GND Ck Dn | 230 |
| pCL1925 vec F | 235 |
| pCL1925 vec R1 | 236 |
| 4219-T7 | 237 |
| 4219-T8 | 238 |
| 4219-T9 | 239 |
| 4219-T10 | 240 |
| 4219-T11 | 241 |
| 4219-T12 | 242 |
| 4219-T13 | 243 |
| 4219-T14 | 244 |
| 4219-T3 | 245 |
| 4219-T4 | 246 |
| 4219-T1 | 247 |
| 4219-T2 | 248 |
| 4219-T5 | 249 |
| 4219-T6 | 225 |
| pRS411::GPM-gsdA-ADH1t vector | 226 |
| pFP996PIdhL1 vector | 142 |
| FP996-gsdA-up (primer) | 141 |
| FP996-gsdA-down (primer) | 184 |
| N473 (forward) | 231 |
| N469 (reverse) | 232 |
| N695A | 233 |
| N696A | 234 |
| pflB CkUp | 297 |
| pflB CkDn | 298 |
| frdB CkUp | 299 |
| frdB CkDn | 300 |
| ldhA CkUp | 301 |
| ldhA CkDn | 302 |
| adhE CkUp | 303 |
| adhE CkDn | 304 |
| gnd CkF | 305 |
| gnd CkR | 306 |
| pfkA CkF | 307 |
| pfkA CkR2 | 308 |
| pfkB CkF2 | 309 |
| pfkB CkR2 | 310 |
| fbaA H1 P1 lox | 311 |
| fbaA H2 P4 lox | 312 |
| fbaA Ck UP | 313 |
| fbaA Ck Dn | 314 |
| fbaB CkF2 | 315 |
| fbaB CkR2 | 316 |
| EE F | 317 |
| EE R | 318 |
| EE Seq F2 | 319 |
| EE Seq F4 | 320 |
| EE Seq R4 | 321 |
| EE Seq R3 | 322 |

TABLE 6
List of SEQ ID Numbers of Enzymes Involved
in Byproduct Formation

| | Amino | Nucleic |
|---|---|---|
| | Acid | Acid |
| | SEQ ID | SEQ ID |
| Description | NO: | NO: |
| pflB pyruvate formate lyase from E. coli | 259 | 260 |
| frdA from E. coli | 261 | 262 |
| frdB from E. coli | 263 | 264 |
| frdC from E. coli | 265 | 266 |
| frdD from E. coli | 267 | 268 |
| adhE alcohol dehydrogenase from E. coli | 269 | 270 |
| ldhA lactate dehydrogenase from E. coli | 271 | 272 |
| ldhL2 lactate dehydrogenase from L. plantarum | 273 | 274 |
| ldhD lactate dehydrogenase from L. plantarum | 275 | 276 |
| ldhL1 lactate dehydrogenase from L. plantarum | 277 | 278 |
| PDC1 pyruvate decarboxylase from | 280 | 279 |
| Saccharomyces cerevisiae | | |
| PDC5 pyruvate decarboxylase from | 282 | 281 |
| Saccharomyces cerevisiae | | |
| PDC6 pyruvate decarboxylase from | 284 | 283 |
| Saccharomyces cerevisiae | | |
| pyruvate decarboxylase from Candida | 286 | 285 |
| glabrata | | |
| PDC1 pyruvate decarboxylase from Pichia | 288 | 287 |
| stipitis | | |
| PDC2 pyruvate decarboxylase from Pichia | 290 | 289 |
| stipitis | | |
| pyruvate decarboxylase from | 292 | 291 |
| Kluyveromyces lactis | | |
| pyruvate decarboxylase from Yarrowia | 294 | 293 |
| lipolytica | | |
| pyruvate decarboxylase from | 296 | 295 |
| Schizosaccharomyces pombe | | |

The following sequences have also been used in this disclosure:
SEQ ID NO: 218 is the CUP1 promoter for Saccharomyces cerevisiae.
SEQ ID NO: 219 is the CYC1 terminator for Saccharomyces cerevisiae.
SEQ ID NO: 220 is the FBA promoter for Saccharomyces cerevisiae.
SEQ ID NO: 222 is the ADH1 terminator for Saccharomyces cerevisiae.
SEQ ID NO: 224 is the GPM promoter for Saccharomyces cerevisiae.
SEQ ID NO: 250 is the lactate dehydrogenase (IdhL1) promoter region for Lactobacillus plantarum.
SEQ ID NOs: 323-328 are genomic DNA sequences (gene coding sequence plus 1 kb upstream and 1 kb downstream) corresponding to PFK1, PFK2, FBA1, GND1, GND2, and PGI1 respectively.

### DETAILED DESCRIPTION OF THE INVENTION

[0030] Applicants have solved the problem stated above by developing a number of production hosts containing modifications to genes involved and/or influencing carbon flux through EDP, oxidative PPP and the EMP as well as associated redox metabolism.

[0031] The present invention relates to recombinant microorganisms useful for the production of isobutanol and meets a number of commercial and industrial needs. Additionally, recombinant microorganisms provided herein can be used in the production of isobutanol from plant derived carbon sources thus avoiding the negative environmental impact associated with standard petrochemical processes for butanol production.

[0032] In most carbohydrate utilizing microorganisms metabolism of central metabolites, glucose- or fructose-derivatives respectively, to pyruvate occurs via at least one of the PPP, the EMP or the EDP. All of these pathways share a common intermediate, glyceraldehyde-3-phosphate, which is ultimately converted to pyruvate by a subset of EMP reactions (see FIG. 2). The combined reactions resulting in conversion of a carbon substrate to pyruvate produce energy (e.g., ATP) and reducing equivalents (e.g. NADH+H+ and NADPH+H+). NADH+H+ and NADPH+H+ must be recycled to their oxidized forms (NAD+ and NADP+, respectively) for cell growth and viability. In aerobic or permissive conditions, the inorganic electron acceptor O₂ is readily available, thus, the reducing equivalents may be used to augment the energy pool. Alternatively, in anaerobic conditions, carbon by-products may be formed, like e.g. CO₂, lactic acid, ethanol, formate, succinate, glycerol and/or others to balance the reducing equivalents.

[0033] The following definitions and abbreviations are to be used for the interpretation of the claims and the specification.

[0034] As used herein, the terms “comprises,” “comprising,” “includes,” “including,” “has,” “having,” “contains” or “containing,” or any other variation thereof, are intended to cover a non-exclusive inclusion. For example, a composition, a mixture, process, method, article, or apparatus that comprises a list of elements is not necessarily limited to only those elements but may include other elements not expressly listed or inherent to such composition, mixture, process, method, article, or apparatus. Further, unless expressly stated to the contrary, “or” refers to an inclusive or and not to an exclusive or. For example, a condition A or B is satisfied by any one of the following: A is true (or present) and B is false (or not present), A is false (or not present) and B is true (or present), and both A and B are true (or present).

[0035] Also, the indefinite articles “a” and “an” preceding an element or component of the invention are intended to be nonrestrictive regarding the number of instances (i.e. occurrences) of the element or component. Therefore “a” or “an” should be read to include one or at least one, and the singular word form of the element or component also includes the plural unless the number is obviously meant to be singular.

[0036] As used herein, the term “about” modifying the quantity of an ingredient or reactant of the invention employed refers to variation in the numerical quantity that can occur, for example, through typical measuring and liquid handling procedures used for making concentrates or use solutions in the real world; through inadvertent error in these procedures; through differences in the manufacture, source, or purity of the ingredients employed to make the compositions or carry out the methods; and the like. The term “about” also encompasses amounts that differ due to different equilibrium conditions for a composition resulting from a particular initial mixture. Whether or not modified by the term “about”, the claims include equivalents to the quantities. In one embodiment, the term “about” means within 10% of the reported numerical value, preferably within 5% of the reported numerical value.

[0037] The term “invention” or “present invention” as used herein is a non-limiting term and is not intended to refer to any single embodiment of the particular invention but encompasses all possible embodiments as described in the specification and the claims.

[0038] The term “NADH” means reduced nicotinamide adenine dinucleotide.

[0039] The term “NADPH” means reduced nicotinamide adenine dinucleotide phosphate.

[0040] The term “ATP” means adenosine-5′-triphosphate. The term “H⁺” means a proton.

[0041] The terms “k_{cat}” and “Kₘ” are known to those skilled in the art and are described in Enzyme Structure and Mechanism, 2_{nd} ed. (Ferst; W.H. Freeman: NY, 1985; pp 98-120). The term “k_{cat}”, often called the “turnover number”, is defined as the maximum number of substrate molecules converted to products per active site per unit time, or the number of times the enzyme turns over per unit time. k_{cat}=Vₘₐₓ/[E], where [E] is the enzyme concentration (Ferst, supra).

[0042] The term “flux” refers to an amount of a compound that is either transported to a different location or reacted into a different compound within a certain time. For a single enzyme reaction, for example, flux is proportional to the enzyme's reaction rate. In this case, the proportionality constant is determined through the stoichiometric coefficients of the reaction, the measuring unit of the balanced compound (e.g. number of molecules, weight, number of carbon atoms, etc.) and the direction of the reaction. Typical units are “millimole per hour” (mmol/h), referring to a molar flux, “gram per hour” (g/h), referring to a weight flux, or “millimole carbon atoms per hour” (mmol(C)/h), referring to a molar carbon flux.

[0043] The term “volumetric flux” as used herein means a flux in a specified volume. Typical units are “millimole per liter per hour” (mmol/l/h), referring to a volumetric molar flux, “gram per liter per hour” (g/l/h), referring to a volumetric weight flux, or “millimole carbon atoms per hour” (mmol(C)/l/h), referring to a volumetric molar carbon flux. If the flux results exclusively from an intracellular reaction, the volumetric flux can be calculated through multiplication of the biomass concentration with the “specific flux”, as defined below.

[0044] The term “specific flux” is a flux normalized by the concentration of biomass dry weight of the biocatalyst/cell that catalyzes the reaction. Typical units are “millimole per gram dry weight per hour” (mmol/g(DW)/h) or gram per gram dry weight per hour” (g/g(DW)/h).

[0045] The term “relative flux” is the specific flux in carbon mol-units, normalized by the specific carbon-molar carbohydrate uptake rate, expressed as a percentage. If no carbon atoms are involved in a reaction, relative flux is normalized to the molar carbohydrate rate.

[0046] The term “chimeric gene” refers to any gene that is not a native gene, comprising regulatory and coding sequences that are not found together in nature. Accordingly, a chimeric gene may comprise regulatory sequences and coding sequences that are derived from different sources, or regulatory sequences and coding sequences derived from the same source, but arranged in a manner different than that found in nature.

[0047] The term “expression”, as used herein, refers to the transcription and stable accumulation of sense (mRNA) or antisense RNA derived from the nucleic acid fragment(s) of the invention. Selected genes may be introduced into the host cell on a plasmid or they may be integrated into the chromosome. Expression may also refer to translation of mRNA into a polypeptide. Specific genes of an enzymatic pathway may be expressed in a cell or cellular compartment to produce the desired in the host cell. Selected genes may be introduced into the host cell on either a plasmid or they may be integrated into the chromosome with appropriate regulatory sequences. The activities of the genes and hence the level of the enzymes produced by them can be adjusted by means of either “up-regulation” or “down-regulation”, as described below.

[0048] The term “upregulation” or “upregulated” when used with regard to a specific gene or set of genes (e.g. encoding a metabolic pathway) means molecular manipulations done to a particular gene or set of genes (e.g., encoding a metabolic pathway), the process of its transcription, translation and/or the molecular properties of the involved molecules in these process, that result in increasing the amount and/or activity of the particular protein or set of proteins encoded by that gene or set of genes. For example, additional copies of selected genes may be introduced into the host cell on multicopy plasmids such as 2 micron vectors (e.g., pRS423 or pHR81), ColE1 vectors (e.g. pUC or pBR322). Such genes may also be integrated into the chromosome with appropriate regulatory sequences that result in increased amount and/or activity of their encoded functions. The genes may be modified so as to be under the control of non-native promoters or altered native promoters, yielding a chimeric gene or a set of chimeric genes. The gene sequences may also be modified in a way that secondary structure of their transcript is affected in order to prevent loops and hairpins that influence transcription efficiency or RNA stability. Endogenous promoters can be altered in vivo by mutation, deletion, and/or substitution.

[0049] The term “downregulation” or “downregulated” with reference to a specific gene or set of genes (e.g. encoding a metabolic pathway) means molecular manipulation done to a particular gene or set of genes (e.g. encoding a metabolic pathway), the process of its transcription, translation and/or the molecular properties of the involved molecules in these process, that results in decreasing the amount and/or activity of the particular protein or set of proteins encoded by that gene or set of genes. For the purposes of this invention, it is useful to distinguish between reduction and elimination. “Downregulation” and “downregulating” of a gene refers to a reduction, but not a total elimination, of the amount and/or activity of the encoded protein. Methods of downregulating genes are known to those of skill in the art. Downregulation can occur by deletion, insertion, or alteration of coding regions and/or regulatory (promoter) regions. Specific down regulations may be obtained by random mutation followed by screening or selection, or, where the gene sequence is known, by direct intervention by molecular biology methods known to those skilled in the art. A particularly useful, but not exclusive, method to achieve downregulation is to alter promoter strength.

[0050] “Deletion” or “deleted” or “disruption” or “disrupted” or “elimination” or “eliminated” used with regard to a gene or set of genes describes various activities for example, 1) deleting coding regions and/or regulatory (promoter) regions, 2) inserting exogenous nucleic acid sequences into coding regions and/regulatory (promoter) regions, and 3) altering coding regions and/or regulatory (promoter) regions (for example, by making DNA base pair changes). Such changes would either prevent expression of the protein of interest or result in the expression of a protein that is non-functional/shows no activity. Specific disruptions may be obtained by random mutation followed by screening or selection, or, in cases where the gene sequences are known, specific disruptions may be obtained by direct intervention using molecular biology methods know to those skilled in the art.

[0051] “Recombinant” refers to an artificial combination of two otherwise separated segments of sequence, e.g., by chemical synthesis or by the manipulation of isolated segments of nucleic acids by genetic engineering techniques. “Recombinant” also includes reference to a cell or vector, that has been modified by the introduction of a heterologous nucleic acid or a cell derived from a cell so modified, but does not encompass the alteration of the cell or vector by naturally occurring events (e.g., spontaneous mutation, natural transformation, natural transduction, natural transposition) such as those occurring without deliberate human intervention. The term “Entner-Doudoroff pathway” or “EDP”, also known as “phosphorylated Entner-Doudoroff pathway” or “phosphorylated EDP”, refers to a sequence of reactions, comprising glucose-6-phosphate dehydrogenase reaction, 6-phosphogluconolactonase reaction, phosphogluconate dehydratase reaction, and 2-dehydro-3-deoxy-phosphogluconate aldolase reaction. The term “functional Entner-Doudoroff pathway” or “functional EDP” refers to the aforementioned sequence of EDP reactions, whereas every single reaction step can exhibit a relative flux of at least 1% under permissive conditions. The term “enhanced Entner-Doudoroff pathway” or “enhanced EDP” refers to the afore mentioned sequence of EDP reactions, whereas at least one reaction step has a relative flux that is at least 1% higher when compared to the relative flux of the respective reaction in a microbial host or cultivation environment without enhanced EDP. In some embodiments, the relative flux is at least 5% higher under permissive conditions, and in some embodiments, the relative flux is at least 10% higher under permissive conditions. A host cell that lacks a native EDP but that is engineered to contain a functional EDP necessarily contains an “enhanced EDP” as used herein.

[0052] The term “oxidative Pentose Phosphate Pathway” or “oxidative PPP” refers to a sequence of reactions, comprising glucose-6-phosphate dehydrogenase reaction, 6-phosphogluconolactonase reaction, and 6-phosphogluconate dehydrogenase reaction. The term “functional oxidative Pentose Phosphate Pathway” or “functional oxidative PPP” refers to the aforementioned sequence of oxidative PPP reactions, whereas every single reaction step can exhibit a relative flux of at least 1% under permissive conditions. The term “diminished oxidative Pentose Phosphate Pathway” or “diminished oxidative PPP” refers to the afore mentioned sequence of oxidative PPP reactions, whereas at least one reaction step has a relative flux that is at least 1% lower when compared to the relative flux of the respective reaction in a microbial host or cultivation environment without diminished oxidative PPP. In some embodiments, the relative flux is at least 5% lower under permissive conditions, and in some embodiments, the relative flux is at least 10% lower under permissive conditions. The term “non-oxidative Pentose Phosphate Pathway” or “non-oxidative PPP” refers to a sequence of reactions, comprising the ribose-5-phosphate isomerase reaction, the ribulose-5-phosphate 3-epimerase reaction, a transketolase and two transaldolase reactions.

[0053] The term “Pentose Phosphate Pathway” or “PPP” refers to a sequence of reactions, comprising the reactions of the oxidative as well as of the non-oxidative PPP. The term “Embden-Meyerhof Pathway”, “EMP” or “glycolysis” refers to a sequence of reactions, comprising glucokinase and/or hexokinase reaction, glucose-6-phosphate isomerase reaction, reaction, fructose-bisphosphate aldolase reaction, triose-phosphate isomerase reaction, glyceraldehyde-3-phosphate dehydrogenase reaction, 3-phosphoglycerate kinase reaction, phosphoglyceromutase reaction, enolase reaction, and pyruvate kinase reaction. The term “functional Embden-Meyerhof Pathway” or “functional EMP” refers to the aforementioned sequence of EMP reactions, whereas every single reaction step can exhibit a relative flux of at least 1% under permissive conditions. The term “diminished Embden-Meyerhof pathway”, “diminished EMP” or “diminished glycolysis” refers to the afore mentioned sequence of EMP reactions, whereas at least one reaction step has a relative flux that is at least 1% lower when compared to the relative flux of the respective reaction in a microbial host or cultivation environment without diminished EMP. In some embodiments, the relative flux is at least 5% lower under permissive conditions, and in some embodiments, the relative flux is at least 10% lower under permissive conditions.

[0054] The increase or decrease in relative flux is herein equated to the degree of enhancement or diminishment. For example, an enhanced EDP demonstrating a relative flux that is about 10% higher can be said to be enhanced by about 10%. Likewise, an EMP demonstrating a relative flux that is about 10% decreased can be said to be diminished by about 10%.

[0055] One of skill in the art will appreciate that certain of the reactions of the EDP are not common with those of the EMP or PPP, and likewise, certain of the reactions of the EMP are not common with those of the PPP. Such reactions are herein referred to as “unique” to the pathway. For example, reactions of the EDP which are not common with those of the EMP or PPP are thus referred to as “unique to the EDP” herein.

[0056] The term “isobutanol biosynthetic pathway” refers to an enzymatic pathway to produce isobutanol. Exemplary isobutanol biosynthetic pathways are discussed and described in U.S. Patent Application Publication No. 20070092957, incorporated herein by reference in its entirety.

[0057] The terms “acetolactate synthase” and “acetolactate synthetase” are used interchangeably herein to refer to an enzyme that catalyzes the conversion of pyruvate to acetolactate and CO₂. Preferred acetolactate synthases are known by the EC number 2.2.1.6 (Enzyme Nomenclature 1992, Academic Press, San Diego). These enzymes are available from a number of sources, including, but not limited to, Bacillus subtilis (GenBank No: CAB15618, amino acid SEQ ID NO:2, nucleic acid SEQ ID NO:1; NCBI (National Center for Biotechnology Information)), Klebsiella pneumoniae (GenBank No: AAA25079, amino acid SEQ ID NO:4, nucleic acid SEQ ID NO:3), and Lactococcus lactis (GenBank No: AAA25161, amino acid SEQ ID NO:6, nucleic acid SEQ ID NO:5).

[0058] The terms “acetohydroxy acid isomeroreductase” and “acetohydroxy acid reductoisomerase” are used interchangeably herein to refer to an enzyme that catalyzes the conversion of acetolactate to 2,3-dihydroxyisovalerate using NADPH (reduced nicotinamide adenine dinucleotide phosphate) as an electron donor. Preferred acetohydroxy acid isomeroreductases are known by the EC number 1.1.1.86 and sequences are available from a vast array of microorganisms, including, but not limited to, Escherichia coli (GenBank No: NP_{—}418222, amino acid SEQ ID NO:8, nucleic acid SEQ ID NO:7), Saccharomyces cerevisiae (GenBank No: NP_{—}013459, amino acid SEQ ID NO:10, nucleic acid SEQ ID NO:9), Methanococcus maripaludis (GenBank No: CAF30210, amino acid SEQ ID NO:12, nucleic acid SEQ ID NO:11), and Bacillus subtilis (GenBank No: CAB14789, amino acid SEQ ID NO:14, nucleic acid SEQ ID NO:13).

[0059] The term “acetohydroxy acid dehydratase” refers to an enzyme that catalyzes the conversion of 2,3-dihydroxyisovalerate to α-ketoisovalerate. Preferred acetohydroxy acid dehydratases are known by the EC number 4.2.1.9. These enzymes are available from a vast array of microorganisms, including, but not limited to, E. coli (GenBank No: YP_{—}026248, amino acid SEQ ID NO:16, nucleic acid SEQ ID NO:15), S. cerevisiae (GenBank No: NP_{—}012550, amino acid SEQ ID NO:18, nucleic acid SEQ ID NO:17), Methanococcus maripaludis (GenBank No: CAF29874, amino acid SEQ ID NO: 20, nucleic acid SEQ ID NO:19), and B. subtilis (GenBank No: CAB14105, amino acid SEQ ID NO:22, nucleic acid SEQ ID NO:21).

[0060] The term “branched-chain α-keto acid decarboxylase” refers to an enzyme that catalyzes the conversion of α-ketoisovalerate to isobutyraldehyde and CO₂. Preferred branched-chain α-keto acid decarboxylases are known by the EC number 4.1.1.72 and are available from a number of sources, including, but not limited to, Lactococcus lactis (GenBank No: AAS49166, amino acid SEQ ID NO:24, nucleic acid SEQ ID NO:23; CAG34226, amino acid SEQ ID NO:26, L. lactis codon optimized kivD nucleic acid SEQ ID NO: 25, nucleic acid SEQ ID NO:189), Salmonella typhimurium (GenBank No: NP_{—}461346, amino acid SEQ ID NO:28, nucleic acid SEQ ID NO:27), and Clostridium acetobutylicum (GenBank No: NP_{—}149189, amino acid SEQ ID NO:30, nucleic acid SEQ ID NO:29).

[0061] The term “branched-chain alcohol dehydrogenase” refers to an enzyme that catalyzes the conversion of isobutyraldehyde to isobutanol. Preferred branched-chain alcohol dehydrogenases are known by the EC number 1.1.1.265, but may also be classified under other alcohol dehydrogenases (specifically, EC 1.1.1.1 or 1.1.1.2). These enzymes preferably utilize NADH (reduced nicotinamide adenine dinucleotide) and/or, less preferably, NADPH as electron donor and are available from a number of sources, including, but not limited to, S. cerevisiae (GenBank No: NP_{—}010656, amino acid SEQ ID NO:32, nucleic acid SEQ ID NO:31; NP_{—}014051, amino acid SEQ ID NO:34, nucleic acid SEQ ID NO:33), E. coli (GenBank No: NP_{—}417-484, amino acid SEQ ID NO:36, nucleic acid SEQ ID NO: 35), and C. acetobutylicum (GenBank No: NP_{—}349892, amino acid SEQ ID NO: 38, nucleotide SEQ ID NO:37; NP_{—}349891, amino acid SEQ ID NO:40, nucleic acid SEQ ID NO:39).

[0062] The term “branched-chain keto acid dehydrogenase” refers to an enzyme that catalyzes the conversion of α-ketoisovalerate to isobutyryl-CoA (isobutyryl-coenzyme A), using NAD⁺ (nicotinamide adenine dinucleotide) as electron acceptor. Preferred branched-chain keto acid dehydrogenases are known by the EC number 1.2.4.4. These branched-chain keto acid dehydrogenases are comprised of four subunits and sequences from all subunits are available from a vast array of microorganisms, including, but not limited to, B. subtilis (GenBank No: CAB14336, amino acid SEQ ID NO:42, nucleic acid SEQ ID NO:41; CAB14335, amino acid SEQ ID NO:44, nucleic acid SEQ ID NO:43; CAB14334, amino acid SEQ ID NO:46, nucleic acid SEQ ID NO:45; and CAB14337, amino acid SEQ ID NO:48, nucleic acid SEQ ID NO:47) and Pseudomonas putida (GenBank No: AAA65614, amino acid SEQ ID NO:50, nucleic acid SEQ ID NO:49; AAA65615, amino acid SEQ ID NO:52, nucleic acid SEQ ID NO:51; AAA65617, amino acid SEQ ID NO:54, nucleic acid SEQ ID NO:53; and AAA65618, amino acid SEQ ID NO:56, nucleic acid SEQ ID NO:55).

[0063] The term “acylating aldehyde dehydrogenase” refers to an enzyme that catalyzes the conversion of isobutyryl-CoA to isobutyraldehyde, using either NADH or NADPH as electron donor. Preferred acylating aldehyde dehydrogenases are known by the EC numbers 1.2.1.10 and 1.2.1.57. These enzymes are available from multiple sources, including, but not limited to, Clostridium beijerinckii (GenBank No: AAD31841, amino acid SEQ ID NO:58, nucleic acid SEQ ID NO:57), C. acetobutylicum (GenBank No: NP_{—}149325, amino acid SEQ ID NO:60, nucleic acid SEQ ID NO:59; NP_{—}149199, amino acid SEQ ID NO:62, nucleic acid SEQ ID NO:61), P. putida (GenBank No: AAA89106, amino acid SEQ ID NO:64, nucleic acid SEQ ID NO:63), and Thermus thermophilus (GenBank No: YP_{—}145486, amino acid SEQ ID NO:66, nucleic acid SEQ ID NO:65).

[0064] The term “transaminase” refers to an enzyme that catalyzes the conversion of α-ketoisovalerate to L-valine, using either alanine or glutamate as amine donor. Preferred transaminases are known by the EC numbers 2.6.1.42 and 2.6.1.66. These enzymes are available from a number of sources. Examples of sources for alanine-dependent enzymes include, but are not limited to, E. coli (GenBank No: YP_{—}026231, amino acid SEQ ID NO:68, nucleic acid SEQ ID NO:67) and Bacillus licheniformis (GenBank No: YP_{—}093743, amino acid SEQ ID NO:70, nucleic acid SEQ ID NO:69). Examples of sources for glutamate-dependent enzymes include, but are not limited to, E. coli (GenBank No: YP_{—}026247, amino acid SEQ ID NO:72, nucleic acid SEQ ID NO:71), S. cerevisiae (GenBank No: NP_{—}012682, amino acid SEQ ID NO:74, nucleic acid SEQ ID NO:73) and Methanobacterium thermoautotrophicum (GenBank No: NP_{—}276546, amino acid SEQ ID NO:76, nucleic acid SEQ ID NO:75).

[0065] The term “valine dehydrogenase” refers to an enzyme that catalyzes the conversion of α-ketoisovalerate to L-valine, using NAD(P)H as electron donor and ammonia as amine donor. Preferred valine dehydrogenases are known by the EC numbers 1.4.1.8 and 1.4.1.9 and are available from a number of sources, including, but not limited to, Streptomyces coelicolor (GenBank No: NP_{—}628270, amino acid SEQ ID NO:78, nucleic acid SEQ ID NO:77) and B. subtilis (GenBank Nos: CAB14339, amino acid SEQ ID NO:80, nucleic acid SEQ ID NO:79).

[0066] The term “valine decarboxylase” refers to an enzyme that catalyzes the conversion of L-valine to isobutylamine and CO₂. Preferred valine decarboxylases are known by the EC number 4.1.1.14. These enzymes are found in Streptomycetes, such as for example, Streptomyces viridifaciens (GenBank No: AAN10242, amino acid SEQ ID NO:82, nucleic acid SEQ ID NO:81).

[0067] The term “omega transaminase” refers to an enzyme that catalyzes the conversion of isobutylamine to isobutyraldehyde using a suitable amino acid as amine donor. Preferred omega transaminases are known by the EC number 2.6.1.18 and are available from a number of sources, including, but not limited to, Alcaligenes denitrificans (AAP92672, amino acid SEQ ID NO:84, nucleic acid SEQ ID NO:83), Ralstonia eutropha (GenBank No: YP_{—}294474, amino acid SEQ ID NO:86, nucleic acid SEQ ID NO:85), Shewanella oneidensis (GenBank No: NP_{—}719046, amino acid SEQ ID NO:88, nucleic acid SEQ ID NO:87), and P. putida (GenBank No: AAN66223, amino acid SEQ ID NO:90, nucleic acid SEQ ID NO:89).

[0068] The term “isobutyryl-CoA mutase” refers to an enzyme that catalyzes the conversion of butyryl-CoA to isobutyryl-CoA. This enzyme uses coenzyme B₁₂ as cofactor. Preferred isobutyryl-CoA mutases are known by the EC number 5.4.99.13. These enzymes are found in a number of Streptomycetes, including, but not limited to, Streptomyces cinnamonensis (GenBank Nos: AAC08713, amino acid SEQ ID NO:92, nucleic acid SEQ ID NO:91; CAB59633, amino acid SEQ ID NO:94, nucleic acid SEQ ID NO:93), S. coelicolor (GenBank No: CAB70645, amino acid SEQ ID NO:96, nucleic acid SEQ ID NO:95; CAB92663, amino acid SEQ ID NO:98, nucleic acid SEQ ID NO:97), and Streptomyces avermitilis (GenBank No: NP_{—}824008, amino acid SEQ ID NO:100, nucleic acid SEQ ID NO:99); NP_{—}824637, amino acid SEQ ID NO:102, nucleic acid SEQ ID NO:101).

[0069] The term “glucose-6-phosphate dehydrogenase”, also known as “6-phosphoglucose dehydrogenase”, “D-glucose 6-phosphate dehydrogenase”, “gdpd”, “G6PDH”, “NADP-dependent glucose 6-phosphate dehydrogenase” or “NADP-glucose-6-phosphate dehydrogenase”, refers to an enzyme that catalyzes the conversion of glucose-6-phosphate to 6-phosphogluconolactone, using either NAD⁺ or NADP⁺ as electron acceptor. Preferred glucose-6-phosphate dehydrogenases are known by the EC number 1.1.1.49. These enzymes are available from a number of sources, including, but not limited to, Aspergillus niger (GenBank No: CAA61194.1, DNA SEQ ID NO: 117, Protein SEQ ID NO: 118), Aspergillus nidulans (GenBank No: XP_{—}660585.1, DNA SEQ ID NO: 119, Protein SEQ ID NO:120), Schizosaccharomyces pombe (GenBank Nos: NP_{—}587749.1, DNA SEQ ID NO: 123, Protein SEQ ID NO:122, and NP_{—}593614.1, DNA SEQ ID NO: 124, Protein SEQ ID NO:125, and NP_{—}593344.2, DNA SEQ ID NO: 121, Protein SEQ ID NO:126), Escherichia coli (E. coli K12 MG1655, GenBank Nos: NP 416366.1, DNA SEQ ID NO: 127, Protein SEQ ID NO:128), Lactobacillus plantarum (GenBank No: NP_{—}786078.1, DNA SEQ ID NO: 131, Protein SEQ ID NO:132)) and Saccharomyces cerevisiae (GenBank No: NP_{—}014158.1, DNA SEQ ID NO: 133, Protein SEQ ID NO:134).

[0070] The term “6-phosphogluconolactonase”, also known as “6-PGL” or “6-phospho-D-glucose-delta-lactone hydrolase”, refers to an enzyme that catalyzes the conversion of 6-phosphogluconolactone to 6-phosphogluconate. Preferred 6-phosphogluconolactonases are known by the EC number 3.1.1.31. These enzymes are available from a number of sources, including, but not limited to Escherichia coli (E. coli K12 MG1655, GenBank Nos: NP_{—}415288.1, DNA SEQ ID NO: 105, Protein SEQ ID NO:106), Lactobacillus plantarum (GenBank No: NP_{—}785709.1, DNA SEQ ID NO: 111, Protein SEQ ID NO:112), Saccharomyces cerevisiae (GenBank No: NP_{—}011764.1, DNA SEQ ID NO: 107, Protein SEQ ID NO:108) and (GenBank No: NP_{—}012033 DNA SEQ ID NO: 190, Protein SEQ ID NO:191)) and Zymomonas mobilis (GenBank No: YP_{—}163213.1, DNA SEQ ID NO: 113, Protein SEQ ID NO:114) and EBI_Protein-ID AAV90102.1, DNA SEQ ID NO: 113, Protein SEQ ID NO:114)).

[0071] The term “phosphogluconate dehydratase”, also known as “6-phospho-D-gluconate hydrolyase”, “6-PG dehydrase” or “gluconate 6-phosphate dehydratase”, refers to an enzyme that catalyzes the conversion of 6-phospho-gluconate to 2-dehydro-3-deoxy-6-phosphogluconate. Preferred phospho-gluconate dehydratases are known by the EC number 4.2.1.12. These enzymes are available from a number of sources, including, but not limited to Zymomonas mobilis (GenBank No: YP_{—}162103.1, DNA SEQ ID NO: 135, Protein SEQ ID NO:136), Pseudomonas putida (GenBank No: NP_{—}743171.1, DNA SEQ ID NO: 137, Protein SEQ ID NO:138) and Escherichia coli (E. coli K12 MG1655, GenBank Nos: NP_{—}416365.1, DNA SEQ ID NO: 139, Protein SEQ ID NO:140).

[0072] The term “2-dehydro-3-deoxy-phosphogluconate aldolase”, also known as “2-Keto-3-deoxy-6-phosphogluconate aldolase”, “2-Oxo-3-deoxy-6-phosphogluconate aldolase”, “6-phospho-2-dehydro-3-deoxy-D-gluconate D-glyceraldehyde-3-phosphate-lyase”, “6-Phospho-2-keto-3-deoxygluconate aldolase”, “Phospho-2-keto-3-deoxygluconic aldolase”, “KDGA”, “KDPG” or “KDPG aldolase”, refers to an enzyme that catalyzes the conversion of 2-dehydro-3-deoxy-6-phosphogluconate to pyruvate and glyceraldehyde 3-phosphate. Preferred 2-dehydro-3-deoxy-phosphogluconate aldolases are known by the EC number 4.1.2.14. These enzymes are available from a number of sources, including, but not limited to Azotobacter vinelandii (GenBank Nos: ZP_{—}00417447.1, DNA SEQ ID NO: 194, Protein SEQ ID NO: 195, and ZP_{—}00415409.1, DNA SEQ ID NO: 196, Protein SEQ ID NO: 197, and ZP_{—}00416840.1, DNA SEQ ID NO: 198, Protein SEQ ID NO: 199, and ZP_{—}00419301.1, DNA SEQ ID NO: 200, Protein SEQ ID NO: 201), Pseudomonas putida (GenBank No: NP_{—}743185.1, DNA SEQ ID NO: 202, Protein SEQ ID NO: 203), Pseudomonas fluorescens (GenBank No: YP_{—}261692.1, DNA SEQ ID NO: 204, Protein SEQ ID NO: 205), Zymomonas mobilis (GenBank No: YP_{—}162732.1, DNA SEQ ID NO: 206, Protein SEQ ID NO: 207) and Escherichia coli (E. coli K12 MG1655, GenBank Nos: NP_{—}416364.1, DNA SEQ ID NO: 208, Protein SEQ ID NO: 209).

[0073] The term “glucose-6-phosphate isomerase”, also known as “D-glucose-6-phosphate aldose-ketose-isomerase”, “D-glucose-6-phosphate isomerase”, “hexosephosphate isomerase”, “PGI”, “phosphoglucoisomerase”, “phosphoglucose isomerase”, “phosphohexoisomerase”, “phosphohexomutase”, “phosphohexose isomerase”, refers to an enzyme that catalyzes the conversion of glucose 6-phosphate to fructose 6-phosphate. Preferred glucose-6-phosphate isomerases are known by the EC number 5.3.1.9. These enzymes are known to occur in, but not be limited to, Escherichia coli (E. coli K12 MG1655, GenBank: GeneID:948535, DNA SEQ ID NO: 155, Protein SEQ ID NO:156), Saccharomyces cerevisiae (GenBank: GeneID:852495, DNA SEQ ID NO: 159, Protein SEQ ID NO:160) and Lactobacillus plantarum (GenBank: GeneID:1062659, DNA SEQ ID NO: 161, Protein SEQ ID NO:162).

[0074] The term “6-phosphofructokinase”, also known as “ATP:D-fructose-6-phosphate 1-phosphotransferase”, “6-phosphofructose 1-kinase”, “D-fructose-6-phosphate 1-phosphotransferase”, “PFK, phospho-1,6-fructokinase” or “phosphofructokinase”, refers to an enzyme that catalyzes the conversion of fructose 6-phosphate and ATP to fructose-1,6-bisphosphate and ADP. Preferred phosphofructokinases are known by the EC number 2.7.1.11. These enzymes are known to occur in, but not be limited to, Escherichia coli (E. coli K12 MG1655, GenBank: GeneID:946230, DNA SEQ ID NO: 163, Protein SEQ ID NO:164 and GeneID:948412, DNA SEQ ID NO: 165, Protein SEQ ID NO:166), (as well as Saccharomyces cerevisiae (GenBank: GeneID:853155, DNA SEQ ID NO: 171, Protein SEQ ID NO:172, and GeneID:855245, DNA SEQ ID NO: 173, Protein SEQ ID NO:174, representing the alpha- and beta-subunit of a heterooctamer) and Lactobacillus plantarum (GenBank: GeneID:1064199, DNA SEQ ID NO: 175, Protein SEQ ID NO:176).

[0075] The term “fructose-bisphosphate aldolase”, also known as “D-fructose-1,6-bisphosphate D-glyceraldehyde-3-phosphate-lyase”, “diphosphofructose aldolase”, “FBP aldolase, fructoaldolase”, “fructose diphosphate aldolase”, “fructose-1,6-bisphosphate aldolase”, “fructose-1,6-bisphosphate triosephosphate-lyase” or “phosphofructoaldolase”, refers to an enzyme that catalyzes the conversion of fructose-1,6-bisphosphate to glycerone phosphate, also known as dihydroxyacetone phosphate, and glyceraldehyde-3-phosphate. Preferred fructose-bisphosphate aldolases are known by the EC number 4.1.2.13. These enzymes are known to occur in, but not be limited to, Escherichia coli (E. coli K12 MG1655, GenBank: GeneID:946632, DNA SEQ ID NO: 177, Protein SEQ ID NO:178) and GeneID:947415, DNA SEQ ID NO: 179, Protein SEQ ID NO:180), as well as Saccharomyces cerevisiae (GenBank: GeneID:853805, DNA SEQ ID NO: 185, Protein SEQ ID NO: 186) and Lactobacillus plantarum (GenBank: GeneID:1062165, DNA SEQ ID NO: 187, Protein SEQ ID NO: 188).

[0076] The term “6-phosphogluconate dehydrogenase”, also known as “phosphogluconate dehydrogenase (decarboxylating)”, also known as “6-phospho-D-gluconate:NADP+2-oxidoreductase (decarboxylating)”, “6-P-gluconate dehydrogenase”, “6-phospho-D-gluconate-NAD(P)+oxidoreductase”, “6-phosphogluconic dehydrogenase”, “6PGD”, “D-gluconate-6-phosphate dehydrogenase” or “phosphogluconic acid dehydrogenase” refers to an enzyme that catalyzes the conversion of 6-phosphogluconate to ribulose-5-phosphate and carbon dioxide, using either NAD⁺ or NADP⁺ as electron acceptor. Preferred 6-phosphogluconate dehydrogenases are known by the EC number 1.1.1.44. These enzymes are known to occur in, but not be limited to, Escherichia coli (E. coli K12 MG1655, GenBank: GeneID:946554 (DNA SEQ ID NO: 143, Protein SEQ ID NO:144) and, Saccharomyces cerevisiae (GenBank: GeneID:853172, DNA SEQ ID NO: 147, Protein SEQ ID NO:148) and GeneID:856589, DNA SEQ ID NO: 149, Protein SEQ ID NO:150) and Lactobacillus plantarum (GenBank: GeneID:1062968, DNA SEQ ID NO: 151, Protein SEQ ID NO:152) and GeneID:1062157, DNA SEQ ID NO: 153, Protein SEQ ID NO:154).

[0077] The term “soluble transhydrogenase”, also known as “NAD(P)⁺ transhydrogenase (B-specific)”, “NADPH:NAD⁺ oxidoreductase (B-specific)”, “NAD transhydrogenase”, “NAD(P) transhydrogenase”, “NADPH-NAD oxidoreductase”, “NADPH-NAD transhydrogenase”, “nicotinamide nucleotide transhydrogenase”, “non-energy-linked transhydrogenase”, “pyridine nucleotide transhydrogenase” or “STH”, refers to an enzyme that catalyzes the conversion of NADPH+H⁺ and NAD⁺ to NADP⁺ and NADH+H⁺. Preferred soluble transhydrogenases are known by the EC number 1.6.1.1. These enzymes are known to occur in, but not be limited to, Escherichia coli (E. coli K12 MG1655, GenBank: GeneID:948461, DNA SEQ ID NO: 257, Protein SEQ ID NO: 258.

### Optimization of Isobutanol Production

[0078] Certain isobutanol production pathways useful in production organisms have a specific co-factor requirement of one NADH and one NADPH for every 2 molecules of pyruvate processed to isobutanol. While not wishing to be bound by theory, it is believed that balancing the specific cofactor requirements of an isobutanol production pathway with the reducing equivalents produced in the conversion of a substrate to pyruvate will improve production. Therefore, one embodiment provided herein is a recombinant microbial host cell comprising an alteration in the EDP, EMP, and/or PPP such that the reducing equivalents generated by the conversion of a substrate to pyruvate are matched to those cofactors required for the production of isobutanol from pyruvate. Preferred embodiments provided herein optimize isobutanol production through preferential use of a functional and/or enhanced EDP which produces one NADH and one NADPH and 2 molecules of pyruvate for each molecule of a hexose-derivative processed. Such balance may increase yield of isobutanol. Preferred yields are about 60% or greater of theoretical, with about 75% or greater of theoretical preferred, about 85% or greater of theoretical more preferred, about 90% or greater of theoretical even more preferred, and with about 95% or greater of theoretical most preferred. In some embodiments, with glucose as the substrate, isobutanol yields are greater than or equal to about 0.3 g/g, greater than or equal to about 0.33 g/g, greater than or equal to about 0.35 g/g, or greater than or equal to about 0.39 g/g.

[0079] Of the preferred hosts disclosed herein, only E. coli is currently known to have genes for the functional operation of the three pathways EMP, oxidative PPP and EDP. S. cerevisiae and L. plantarum do not have endogenous genes required for a functional EDP in their genome. In both species, no genes encoding a phosphogluconate dehydratase reaction (EC number 4.2.1.12) and a 2-dehydro-3-deoxy-phosphogluconate aldolase reaction (EC number 4.1.2.14) were identified to date.

[0080] In cases where the required components for a functional EDP are not endogenous to the host, missing enzymes can be expressed. Host cells modified in this way contain a “functional heterologous EDP”. Thus, regardless of the host cell, the relative EDP flux may be increased by introducing and/or up-regulating the respective pathway genes using recombinant DNA technology methodologies.

[0081] Examples of enzymes suitable to augment EDP pathways include the following: Glucose-6-phosphate dehydrogenases (EC-Number 1.1.1.49) of both Aspergillus niger and Aspergillus nidulans exhibit strict specificity towards both substrates glucose 6-phosphate and NADP⁺ (Wennekes, L. M., and Goosen, T., J. Gen. microbiol., 139: 2793-2800, 1993). In both Aspergilli species the glucose-6-phosphate dehydrogenase activity is regulated by the NADPH:NADP⁺ ratio. The kinetic parameters for the A. niger enzyme are: Kₘ(G6P)=153±10 μM, Kₘ(NADP⁺)=26±8 μM, vₘₐₓ=790 μmol(NADPH/min/mg(protein), while these paramters for A. nidulans enzyme are: Kₘ(G6P)=92±10 μM, Kₘ(NADP⁺)=30±8 μM, Kᵢ(NADPH)=20±5 μM, vₘₐₓ=745 μmol(NADPH/min/mg(protein).

### The Embden-Meyerhof Pathway (EMP)

[0082] The typical EMP from glucose to pyruvate comprises a sequence of 10 reactions (see FIG. 2):
[0083] (1) the hexokinase and/or glucokinase reaction, converting glucose to glucose-6-phosphate,
[0084] (2) the glucose-6-phosphate isomerase reaction, converting glucose-6-phosphate into fructose-6-phosphate,
[0085] (3) the 6-phosphofructokinase reaction, converting fructose-6-phosphate to fructose-1,6-bisphosphate,
[0086] (4) the fructose-bisphosphate aldolase reaction, converting fructose-1,6-bisphosphate to glyceraldehyde-3-phosphate and dihydroxy-acetonephosphate,
[0087] (5) the triose-phosphate isomerase reaction, converting dihydroxyacetone-phosphate to glyceraldehyde-3-phosphate
[0088] (6) the glyceraldehyde-3-phosphate dehydrogenase reaction, converting glyceraldehyde-3-phosphate to 1,3-biphosphoglycerate,
[0089] (7) the 3-phosphoglycerate kinase reaction, converting 1,3-biphosphoglycerate to 3-phosphoglycerate,
[0090] (8) the phosphoglyceromutase reaction, converting 3-phosphoglycerate into 2-phosphoglycerate,
[0091] (9) the enolase reaction, converting 2-phosphoglycerate to phosphoenolpyruvate,
[0092] (10) the pyruvate kinase reaction, converting phosphoenolpyruvate to pyruvate.

[0093] In this set of reactions only the glyceraldehyde-3-phosphate dehydrogenase reaction produces redox equivalents 2[H], typically through the generation of NADH from NAD⁺. Whereas the 6-phosphofructokinase reaction requires a phosphate group and a driving force, typically provided by the concomitant conversion of ATP to ADP and Pᵢ, the carbon compound conversions of the 3-phosphoglycerate kinase reaction and the pyruvate kinase reaction each are exergonic under most physiological conditions. The metabolic system typically salvages these energies through coupling the carbon compound conversion with the production of ATP from ADP and Pᵢ. Conversion of glucose to pyruvate using the EMP reactions (not considering the balancing of protons and electric charges) can be summarized as:

1 glucose+2 ADP+2 Pᵢ->2 pyruvate+2 ATP+4 [H]

[0094] Assuming cofactor specificity of NAD⁺ for the glyceraldehyde-3-phosphate dehydrogenase reaction, conversion of glucose to pyruvate using the PPP reactions can be summarized as:

1 glucose+2 ADP+2 Pᵢ+2 NAD⁺->2 pyruvate+2 ATP+2 NADH+H⁺

### The Pentose Phosphate Pathway (PPP)

[0095] A typical pathway from glucose to pyruvate through the PPP, comprising reactions of the oxidative and non-oxidative PPP as well as some EMP reactions consists of a sequence of 15 reactions (see FIG. 2):
[0096] (1) the hexokinase and/or glucokinase reaction, converting glucose to glucose-6-phosphate,
[0097] (2) the glucose-6-phosphate dehydrogenase reaction, converting glucose-6-phosphate to 6-phosphoglucono-1,5-lactone,
[0098] (3) the 6-phosphogluconolactonase reaction, converting 6-phosphoglucono-1,5-lactone to 6-phosphogluconate,
[0099] (4) the 6-phosphogluconate dehydrogenase reaction, converting 6-phosphogluconate to ribulose-5-phosphate and carbon dioxide,
[0100] (5) the ribose-5-phosphate isomerase reaction, converting ribulose-5-phosphate to ribose-5-phosphate,
[0101] (6) the ribulose-5-phosphate 3-epimerase reaction, converting ribulose-5-phosphate to xylulose-5-phosphate,
[0102] (7) a transketolase reaction, converting xylulose-5-phosphate and ribose-5-phosphate to sedoheptulose-7-phosphate and glyceraldehyde-3-phosphate,
[0103] (8) the transaldolase reaction, converting sedoheptulose-7-phosphate and glyceraldehyde-3-phosphate to fructose-6-phosphate and erythrose-4-phosphate,
[0104] (9) a transketolase reaction, converting erythrose-4-phosphate and xylulose-5-phosphate into fructose-6-phosphate and glyceraldehyde-3-phosphate,
[0105] (10) the glucose-6-phosphate isomerase reaction, converting fructose-6-phosphate into glucose-6-phosphate,
[0106] (11) the glyceraldehyde-3-phosphate dehydrogenase reaction, converting glyceraldehyde-3-phosphate into 1,3-biphosphoglycerate,
[0107] (12) the 3-phosphoglycerate kinase reaction, converting 1,3-biphosphoglycerate into 3-phosphoglycerate
[0108] (13) the phosphoglyceromutase reaction, converting 3-phosphoglycerate into 2-phosphoglycerate,
[0109] (14) the enolase reaction, converting 2-phosphoglycerate into phosphoenolpyruvate,
[0110] (15) the pyruvate kinase reaction, converting phosphoenolpyruvate into pyruvate.

[0111] In this pathway, the glucose-6-phosphate dehydrogenase reaction, 6-phosphogluconate dehydrogenase reaction and glyceraldehyde-3-phosphate dehydrogenase reaction produce redox equivalents, 2[H], typically through the generation of either NADPH or NADH from NADP⁺ or NAD⁺. As indicated above, the 3-phosphoglycerate kinase and the pyruvate kinase reactions are exergonic under most physiological conditions. The metabolic system typically salvages these energies through coupling the reaction with production of ATP from ADP and P. In summary, conversion of glucose to pyruvate using the PPP reactions (not considering the balancing of protons and electric charges) can be summarized as:

1 glucose+1 ADP+1 Pᵢ->1 pyruvate+3 CO₂+1 ATP+14 [H]

[0112] Assuming cofactor specificity of NADP⁺ for the glucose-6-phosphate dehydrogenase and 6-phosphogluconate dehydrogenase reactions, and NAD⁺ cofactor specificity for the glyceraldehyde-3-phosphate dehydrogenase reaction, conversion of glucose to pyruvate via PPP can be summarized as:

1 glucose+1 ADP+1 Pᵢ+6 NADP⁺+1 NAD⁺--->1 pyruvate+3 CO₂+1 ATP+6 NADPH+H⁺+1 NADH+H⁺

### The Entner-Doudoroff Pathway (EDP)

[0113] A typical pathway from glucose to pyruvate through the EDP comprises a sequence of 10 reactions (see FIG. 2):
[0114] (1) the hexokinase and/or glucokinase reaction, converting glucose to glucose-6-phosphate,
[0115] (2) the glucose-6-phosphate dehydrogenase reaction, converting glucose-6-phosphate to 6-phosphoglucono-1,5-lactone,
[0116] (3) the 6-phosphogluconolactonase reaction, converting 6-phosphoglucono-1,5-lactone to 6-phosphogluconate,
[0117] (4) the phosphogluconate dehydratase reaction, converting 6-phosphogluconate to 2-dehydro-3-deoxy-phosphogluconate,
[0118] (5) the 2-dehydro-3-deoxy-phosphogluconate aldolase reaction, converting 2-dehydro-3-deoxy-phosphogluconate to pyruvate and glyceraldehyde-3-phosphate,
[0119] (6) the glyceraldehyde-3-phosphate dehydrogenase reaction, converting glyceraldehyde-3-phosphate to 1,3-biphosphoglycerate,
[0120] (7) the 3-phosphoglycerate kinase reaction, converting 1,3-biphosphoglycerate to 3-phosphoglycerate,
[0121] (8) the phosphoglyceromutase reaction, converting 3-phosphoglycerate into 2-phosphoglycerate,
[0122] (9) the enolase reaction, converting 2-phosphoglycerate to phosphoenolpyruvate,
[0123] (10) the pyruvate kinase reaction, converting phosphoenolpyruvate to pyruvate.

[0124] In this pathway, the glucose-6-phosphate dehydrogenase reaction and glyceraldehyde-3-phosphate dehydrogenase reaction produce redox equivalents 2[H], typically through the generation of either NADPH or NADH from NADP⁺ or NAD⁺, respectively. The 3-phosphoglycerate kinase reaction and the pyruvate kinase reaction each are exergonic under most physiological conditions. The metabolic system typically salvages these energies through coupling the carbon compound conversion with the production of ATP from ADP and P. Conversion of glucose to pyruvate via EDP can be summarized as:

[0125] 1 glucose+1 ADP+1 Pᵢ--->2 pyruvate+1 ATP+4 [H] Assuming cofactor specificity of NADP⁺ for the glucose-6-phosphate dehydrogenase and NAD⁺ for the glyceraldehyde-3-phosphate dehydrogenase reaction, conversion of glucose to pyruvate via the EDP can be summarized as:

1 glucose+1 ADP+1 Pᵢ--->2 pyruvate+1 ATP+1 NADH+H⁺+1 NADPH+H⁺

There are two major variants of the EDP, known as “partially phosphorylated EDP” and “non-phosphorylated EDP” (Romano, A. H., and Conway, T., Res. Microbiol., 147: 448-455, 1996). In the non-phosphorylated EDP, glucose is oxidized to gluconate by NAD(P)⁺-dependent glucose dehydrogenase (EC 1.1.1.47) and either gluconolactonase (EC 3.1.1.17) or spontaneous hydrolysis, and subsequently dehydrated by gluconate dehydratase (EC 4.2.1.39) to yield 2-dehydro-3-deoxy-6-gluconate, which is then cleaved by 2-dehydro-3-deoxy-6-gluconate aldolase to pyruvate and glyceraldehyde (Kim, S, and Lee, S. B., Biochem. J., 387: (pt 1): 271-280, 2005). This pathway was found active in S. solfataricus (De Rosa, M., and Gambacorta, A., Biochem. J., 224: 407-414, 1984), and also in the thermoacidophilic archaeon Thermoplasma acidophilum (Budgen. N., and Danson, M. J., FEBS Letters, 196: 207-210, 1986). Glyceraldehyde formed through the non-phosphorylated route is converted by glyceraldehyde dehydrogenase into glycerate, which is then phosphorylated to form 2-phosphoglycerate. This intermediate is then converted to generate one molecule of pyruvate by enolase reaction and pyruvate kinase reaction. Whereas the redox and carbon balance of the non-phosphoylated EDP is comparable with the phosphorylated EDP, the energy yield is less favorable. Assuming cofactor specificity of NADP⁺ for the glucose dehydrogenase and NAD⁺ for the glyceraldehyde dehydrogenase reaction, conversion of glucose to pyruvate via non-phosphorylated EDP (not considering the balancing of protons and electric charges) is summarized as:

1 glucose---->2 pyruvate+1 NADH+H⁺+1 NADPH+H⁺

Consequently the production of isobutanol from glucose through the non-phosphorylated pathway would not result in any net energy production, e.g. in terms of ATP formation.

[0126] The partially phosphorylated EDP was first observed in Rhodobacter sphaeroides (Szymona, M., and Doudoroff, M., J. Gen. Microbiol., 22: 167-183, 1960), and was later found in other bacteria and halophilic archaea (Conway, T., FEMS Microbiol Rev., 9: 1-27, 1992). In the partially phosphorylated EDP, glucose is converted into gluconate and 2-dehydro-3-deoxy-6-gluconate as in the non-phosphorylated EDP pathway, but the 2-dehydro-3-deoxy-6-gluconate produced by gluconate dehydratase is then phosphorylated by 2-dehydro-3-deoxy-6-gluconate kinase (EC 2.7.1.45) to 2-dehydro-3-deoxy-6-phospho-gluconate. 2-dehydro-3-deoxy-6-phospho-gluconate is then cleaved by 2-dehydro-3-deoxy-6-phosphogluconate aldolase to pyruvate and glyceraldehyde-3-phosphate and processed further in the reaction sequence already described for the discussion of the phosphorylated EDP. Assuming cofactor specificity of NADP⁺ for the glucose dehydrogenase and NAD⁺ for the glyceraldehyde-3-phosphate dehydrogenase reaction, conversion of glucose to pyruvate through the reaction sequence of the partially phosphorylated EDP (not considering the balancing of protons and electric charges) is summarized as:

1 glucose+1 ADP+1 Pᵢ--->2 pyruvate+1 ATP+1 NADH+H⁺+1 NADPH+H⁺

Consequently with respect to the overall balance for the metabolism of glucose to isobutanol and assuming the stated cofactor dependencies, there is no difference between the phosphorylated and the partially phosphorylated EDP.

### Isobutanol Biosynthetic Pathways

[0127] Isobutanol can be produced from carbohydrate sources with recombinant microorganisms by through various biosynthetic pathways. Preferred pathways converting pyruvate to isobutanol include the four complete reaction pathways shown in FIG. 1. A suitable isobutanol pathway (FIG. 1, steps a to e), comprises the following substrate to product conversions:
[0128] a) pyruvate to acetolactate, as catalyzed for example by acetolactate synthase,
[0129] b) acetolactate to 2,3-dihydroxyisovalerate, as catalyzed for example by acetohydroxy acid isomeroreductase,
[0130] c) 2,3-dihydroxyisovalerate to α-ketoisovalerate, as catalyzed for example by acetohydroxy acid dehydratase,
[0131] d) α-ketoisovalerate to isobutyraldehyde, as catalyzed for example by a branched-chain keto acid decarboxylase, and
[0132] e) isobutyraldehyde to isobutanol, as catalyzed for example by, a branched-chain alcohol dehydrogenase.

[0133] This pathway combines enzymes involved in pathways for valine biosynthesis (pyruvate to α-ketoisovalerate) and valine catabolism α-ketoisovalerate to isobutanol). Since many valine biosynthetic enzymes also catalyze analogous reactions in the isoleucine biosynthetic pathway, substrate specificity is a major consideration in selecting the gene sources. For this reason, the preferred genes for the acetolactate synthase enzyme are those from Bacillus (alsS) and Klebsiella (budB). These particular acetolactate synthases participate in butanediol fermentation in these organisms and show increased affinity for pyruvate over ketobutyrate (Gollop et al., J. Bacteriol. 172: 3444-3449, 1990); Holtzclaw et al., J. Bacteriol. 121: 917-922, 1975). The second and third pathway steps are catalyzed by acetohydroxy acid reductoisomerase and dehydratase, respectively. These enzymes have been characterized from a number of sources, such as for example, E. coli (Chunduru et al., Biochemistry 28:486-493, 1989); Flint et al., J. Biol. Chem. 268:14732-14742, 1993). The final two steps of the preferred isobutanol pathway occur in yeast, which can use valine as a nitrogen source and, in the process, secrete isobutanol. α-Ketoisovalerate can be converted to isobutyraldehyde by a number of keto acid decarboxylase enzymes, such as for example pyruvate decarboxylase. To prevent misdirection of pyruvate away from isobutanol production, a decarboxylase with decreased affinity for pyruvate is preferred. Suitable enzymes include two known in the art (Smit et al., Appl. Environ. Microbiol. 7:303-311, 2005); de la Plaza et al., FEMS Microbiol. Lett. 238: 367-374, 2004). Both enzymes are from strains of Lactococcus lactis and have a 50-200-fold preference for ketoisovalerate over pyruvate. Finally, a number of aldehyde reductases have been identified in yeast, many with overlapping substrate specificity. Those known to prefer branched-chain substrates over acetaldehyde include, but are not limited to, alcohol dehydrogenase VI (ADH6) and Ypr1p (Larroy et al., Biochem. J. 361:163-172, 2002); Ford et al., Yeast 19:1087-1096, 2002), both of which use NADPH as electron donor. An NADPH-dependent reductase, YqhD, active with branched-chain substrates has also been identified in E. coli (Sulzenbacher et al., J. Mol. Biol. 342: 489-502, 2004).

[0134] Another suitable pathway for converting pyruvate to isobutanol comprises the following substrate to product conversions (FIG. 1, steps a,b,c,f,g,e):
[0135] a) pyruvate to acetolactate, as catalyzed for example by acetolactate synthase,
[0136] b) acetolactate to 2,3-dihydroxyisovalerate, as catalyzed for example by acetohydroxy acid isomeroreductase,
[0137] c) 2,3-dihydroxyisovalerate to α-ketoisovalerate, as catalyzed for example by acetohydroxy acid dehydratase,
[0138] f) α-ketoisovalerate to isobutyryl-CoA, as catalyzed for example by a branched-chain keto acid dehydrogenase,
[0139] g) isobutyryl-CoA to isobutyraldehyde, as catalyzed for example by an acylating aldehyde dehydrogenase, and
[0140] e) isobutyraldehyde to isobutanol, as catalyzed for example by, a branched-chain alcohol dehydrogenase.

[0141] The first three steps in this pathway (a,b,c) are the same as those described above. The α-ketoisovalerate is converted to isobutyryl-CoA by the action of a branched-chain keto acid dehydrogenase. While yeast can only use valine as a nitrogen source, many other organisms (both eukaryotes and prokaryotes) can use valine as the carbon source as well. These organisms have branched-chain keto acid dehydrogenase (Sokatch et al. J. Bacteriol. 148: 647-652, 1981), which generates isobutyryl-CoA. Isobutyryl-CoA may be converted to isobutyraldehyde by an acylating aldehyde dehydrogenase. Dehydrogenases active with the branched-chain substrate have been described, but not cloned, in Leuconostoc and Propionibacterium (Kazahaya et al., J. Gen. Appl. Microbiol. 18: 43-55, 1972); Hosoi et al., J. Ferment. Technol. 57: 418-427, 1979). However, it is also possible that acylating aldehyde dehydrogenases known to function with straight-chain acyl-CoAs (i.e. butyryl-CoA), may also work with isobutyryl-CoA. The isobutyraldehyde is then converted to isobutanol by a branched-chain alcohol dehydrogenase, as described above for the first pathway.

[0142] Another suitable pathway for converting pyruvate to isobutanol comprises the following substrate to product conversions (FIG. 1, steps a,b,c,h,i,j,e):
[0143] a) pyruvate to acetolactate, as catalyzed for example by acetolactate synthase,
[0144] b) acetolactate to 2,3-dihydroxyisovalerate, as catalyzed for example by acetohydroxy acid isomeroreductase,
[0145] c) 2,3-dihydroxyisovalerate to α-ketoisovalerate, as catalyzed for example by acetohydroxy acid dehydratase,
[0146] h) α-ketoisovalerate to valine, as catalyzed for example by valine dehydrogenase or transaminase,
[0147] i) valine to isobutylamine, as catalyzed for example by valine decarboxylase,
[0148] j) isobutylamine to isobutyraldehyde, as catalyzed for example by omega transaminase, and
[0149] e) isobutyraldehyde to isobutanol, as catalyzed for example by, a branched-chain alcohol dehydrogenase.

[0150] The first three steps in this pathway (a,b,c) are the same as those described above. This pathway requires the addition of a valine dehydrogenase or a suitable transaminase. Valine (and or leucine) dehydrogenase catalyzes reductive amination and uses ammonia; Kₘ values for ammonia are in the millimolar range (Priestly et al., Biochem J. 261: 853-861, 1989); Vancura et al., J. Gen. Microbiol. 134: 3213-3219, 1988) Zink et al., Arch. Biochem. Biophys. 99: 72-77, 1962); Sekimoto et al. J. Biochem (Japan) 116:176-182, 1994). Transaminases typically use either glutamate or alanine as amino donors and have been characterized from a number of organisms (Lee-Peng et al., J. Bacteriol. 139:339-345, 1979); Berg et al., J. Bacteriol. 155:1009-1014, 1983). An alanine-specific enzyme may be desirable, since the generation of pyruvate from this step could be coupled to the consumption of pyruvate later in the pathway when the amine group is removed (see below). The next step is decarboxylation of valine, a reaction that occurs in valinomycin biosynthesis in Streptomyces (Garg et al., Mol. Microbiol. 46:505-517, 2002). The resulting isobutylamine may be converted to isobutyraldehyde in a pyridoxal 5′-phosphate-dependent reaction by, for example, an enzyme of the omega-aminotransferase family. Such an enzyme from Vibrio fluvialis has demonstrated activity with isobutylamine (Shin et al., Biotechnol. Bioeng. 65:206-211,1999). Another omega-aminotransferase from Alcaligenes denitrificans has been cloned and has some activity with butylamine (Yun et al., Appl. Environ. Microbiol. 70:2529-2534, 2004). In this direction, these enzymes use pyruvate as the amino acceptor, yielding alanine. As mentioned above, adverse affects on the pyruvate pool may be offset by using a pyruvate-producing transaminase earlier in the pathway. The isobutyraldehyde is then converted to isobutanol by a branched-chain alcohol dehydrogenase, as described above for the first pathway.

[0151] A fourth suitable isobutanol biosynthetic pathway comprises the substrate to product conversions shown as steps k,g,e in FIG. 1. A number of organisms are known to produce butyrate and/or butanol via a butyryl-CoA intermediate (Dürre et al., FEMS Microbiol. Rev. 17: 251-262,995); Abbad-Andaloussi et al., Microbiology, 142: 1149-1158,1996). Isobutanol production may be engineered in these organisms by addition of a mutase able to convert butyryl-CoA to isobutyryl-CoA (FIG. 1, step k). Genes for both subunits of isobutyryl-CoA mutase, a coenzyme B₁₂-dependent enzyme, have been cloned from a Streptomycete (Ratnatilleke et al., J. Biol. Chem. 274:31679-31685, 1999). The isobutyryl-CoA is converted to isobutyraldehyde (step g in FIG. 1), which is converted to isobutanol (step e in FIG. 1).

[0152] Useful for the last step of converting isobutyraldehyde to isobutanol is a new butanol dehydrogenase isolated from an environmental isolate of a bacterium identified as Achromobacter xylosoxidans, called sadB (DNA: SEQ ID NO:103, protein SEQ ID NO:104).

[0153] The preferred use in all three pathways of ketol-acid reductoisomerase (KARI) enzymes with particularly high activities is disclosed in U.S. Patent Application Publication No. 20080261230. Examples of high activity KARIs disclosed therein are those from Vibrio cholerae (DNA: SEQ ID NO:212; protein SEQ ID NO:213), Pseudomonas aeruginosa PAO1, (DNA: SEQ ID NO: 214; protein SEQ ID NO:215), and Pseudomonas fluorescens PF5 (DNA: SEQ ID NO:216; protein SEQ ID NO:217).

[0154] A person of skill in the art will be able to utilize publicly available sequences to construct relevant pathways. A listing of a representative number of genes known in the art and useful in the construction of isobutanol biosynthetic pathways are listed in Table 1. Additionally, one of skill in the art, equipped with this disclosure, will appreciate other suitable isobutanol pathways.

[0155] It is contemplated that the enzymes for an isobutanol biosynthetic pathway may have less than 100% identity to the example amino acid sequences presented herein, and still function in the biosynthetic pathway. Thus, embodiments of the present invention include host cells comprising an enzyme that catalyzes a reaction of the isobutanol biosynthetic pathway and that has at least about 70%, at least about 80%, at least about 85%, at least about 90%, at least about 95%, or at least about 98% identity to the corresponding amino acid sequences provided herein.

[0156] The term “percent identity”, as known in the art, is a relationship between two or more polypeptide sequences or two or more polynucleotide sequences, as determined by comparing the sequences. In the art, “identity” or “sequence identity” also means the degree of sequence relatedness between polypeptide or polynucleotide sequences, as the case may be, as determined by the match between strings of such sequences. “Identity” and “similarity” can be readily calculated by known methods, including but not limited to those described in: 1.) Computational Molecular Biology (Lesk, A. M., Ed.) Oxford University: NY (1988); 2.) Biocomputing: Informatics and Genome Projects (Smith, D. W., Ed.) Academic: NY (1993); 3.) Computer Analysis of Sequence Data, Part I (Griffin, A. M., and Griffin, H. G., Eds.) Humania: NJ (1994); 4.) Sequence Analysis in Molecular Biology (von Heinje, G., Ed.) Academic (1987); and 5.) Sequence Analysis Primer (Gribskov, M. and Devereux, J., Eds.) Stockton: NY (1991).

[0157] Preferred methods to determine identity are designed to give the best match between the sequences tested. Methods to determine identity and similarity are codified in publicly available computer programs. Sequence alignments and percent identity calculations may be performed using the MegAlign™ program of the LASERGENE bioinformatics computing suite (DNASTAR Inc., Madison, Wis.). Multiple alignment of the sequences is performed using the “Clustal method of alignment” which encompasses several varieties of the algorithm including the “Clustal V method of alignment” corresponding to the alignment method labeled Clustal V (described by Higgins and Sharp, CABIOS. 5:151-153 (1989); Higgins, D. G. et al., Comput. Appl. Biosci., 8:189-191 (1992)) and found in the MegAlign™ program of the LASERGENE bioinformatics computing suite (DNASTAR Inc.). For multiple alignments, the default values correspond to GAP PENALTY=10 and GAP LENGTH PENALTY=10. Default parameters for pairwise alignments and calculation of percent identity of protein sequences using the Clustal method are KTUPLE=1, GAP PENALTY=3, WINDOW=5 and DIAGONALS SAVED=5. For nucleic acids these parameters are KTUPLE=2, GAP PENALTY=5, WINDOW=4 and DIAGONALS SAVED=4. After alignment of the sequences using the Clustal V program, it is possible to obtain a “percent identity” by viewing the “sequence distances” table in the same program. Additionally the “Clustal W method of alignment” is available and corresponds to the alignment method labeled Clustal W (described by Higgins and Sharp, CABIOS. 5:151-153 (1989); Higgins, D. G. et al., Comput. Appl. Biosci. 8:189-191 (1992) Thompson, J. D., Higgins, D. G., and Gibson T. J. (1994) Nuc. Acid Res. 22: 4673 4680) and found in the MegAlign™ v6.1 program of the LASERGENE bioinformatics computing suite (DNASTAR Inc.). Default parameters for multiple alignment (GAP PENALTY=10, GAP LENGTH PENALTY=0.2, Delay Divergen Seqs(%)=30, DNA Transition Weight=0.5, Protein Weight Matrix=Gonnet Series, DNA Weight Matrix=IUB). After alignment of the sequences using the Clustal W program, it is possible to obtain a “percent identity” by viewing the “sequence distances” table in the same program.

### Microbial Hosts for Isobutanol Production

[0158] Microbial hosts for isobutanol production may be selected from bacteria (gram negative or gram positive), cyanobacteria, filamentous fungi and yeasts. The microbial hosts selected for the production of isobutanol should be able to convert carbohydrates to isobutanol. Suitable hosts may be selected based on criteria including: high rate of glucose utilization, availability of genetic tools for gene manipulation, and/or the ability to generate stable chromosomal alterations.

[0159] Suitable microbial hosts for the production of isobutanol include, but are not limited to, the group of Gram-positive and Gram-negative bacteria as well as fungi, preferably to members of the genera Clostridium, Zymomonas, Escherichia, Salmonella, Serratia, Erwinia, Klebsiella, Shigella, Rhodococcus, Pseudomonas, Bacillus, Lactobacillus, Enterococcus, Alcaligenes, Klebsiella, Paenibacillus, Arthrobacter, Corynebacterium, Brevibacterium, Schizosaccharomyces, Kluyveromyces, Yarrowia, Pichia, Candida, Hansenula, and Saccharomyces. Preferred hosts include: Escherichia coli, Lactobacillus plantarum, and Saccharomyces cerevisiae.

[0160] Due to the toxicity of isobutanol to microorganisms, host strains that are more tolerant to isobutanol are particularly suitable. Selection of such tolerant hosts has been disclosed in U.S. Patent Application Publication No. 20070259411.

### Soluble Transhydrogenases

[0161] When an isobutanol biosynthetic pathway having the need for one NADH and one NADPH for every 2 molecules of pyruvate processed in the pathway to isobutanol is employed, it will be desirable if each species of reduction equivalents generated through the EDP, i.e., NADPH+H⁺ and NADH+H⁺, would be available for biosynthesis of isobutanol and not consumed in other reactions. This suggests the implementation of a flux regime that prevents any thermodynamically favored formation of NADH+H⁺ from NAD⁺ through concomitant conversion of NADPH+H⁺ into NADP⁺, catalyzed by either one or more reaction steps for the enhanced production of isobutanol.

[0162] One reaction step known to catalyze the conversion of NADPH+H⁺ into NADP⁺ through the concomitant conversion of NAD⁺ into NADH+H⁺ is carried out by a soluble transhydrogenase. For example, while Enterobacteriaceae are known to contain a soluble NADPH:NAD⁺ oxidoreductase (Sauer, U., and Canonaco, F., J. Biol. Chem., 279: 6613-6619, 2004), encoded by sthA, also referred to as udhA (Sauer, U., and Canonaco, F., supra), such an enzyme does not exist in organisms such as Saccharomyces cerevisiae which therefore cannot tolerate imbalances between catabolic NADPH production and anabolic NADPH consumption. The hypothesis of a missing soluble transhydrogenase in S. cerevisiae was further supported by the findings that a glucose-6-phosphate isomerase mutant (pgi mutant) of S. cerevisiae could not grow on glucose (Maitra, P. K., J. Bacteriol., 276: 34840-34846, 1971). However, overexpression of the soluble transhydrogenase (sthA/udhA) of E. coli, which allowed conversion of NADPH+H⁺ into NADP⁺, partially restored growth of the pgi S. cerevisiae mutant (Fiaux, J., and Cakar, Z. P., Eukaryot Cell., 2: 170-180, 2003). To date, no soluble transhydrogenase has been identified in Lactobacilli (Schomburg, D-BRENDA, The comprehensive enzyme information system, Release 2007.1., Biobase).

### By-Product Formation

[0163] It will be appreciated that reduction and preferably elimination of by-products of carbon metabolism other than carbon dioxide and isobutanol would be advantageous for production of isobutanol. For example microorganisms metabolizing sugar substrates produce a variety of by-products in a mixed acid fermentation (Moat, A. G. et al., MicrobialPhysiology, 4th edition, John Wiley Publishers, N.Y., 2002). Typical products of the bacterial mixed acid fermentation are acids and alcohols such as formic, lactic and succinic acids and ethanol and acetate. Yeast metabolizing sugar substrates produce a variety of by-products like acids and alcohols such as, but not limited to, formate, lactate, succinate, ethanol, acetate and glycerol. Formation of these byproducts during isobutanol fermentation lower the yield of isobutanol. To prevent yield loss of isobutanol the genes encoding enzyme activities corresponding to byproduct formation can be down-regulated or disrupted using methods described herein and/or known in the art.

[0164] Enzymes involved in byproduct formation in E. coli include, but are not limited to: 1) Pyruvate formate lyase (EC 2.3.1.54), encoded by pflB gene (amino acid SEQ ID NO: 259; DNA SEQ ID NO: 260), that metabolizes pyruvate to formate and acetyl-coenzyme A. Deletion of this enzyme removes the competition for pyruvate to form formate and acetyl-CoA; 2) Fumarate reductase enzyme complex (EC 1.3.99.1), encoded by frdABCD operon, that catalyses the reduction of fumarate to succinate and requires NADH; the FrdA (amino acid SEQ ID NO: 261; DNA SEQ ID NO: 262) subunit contains a covalently bound flavin adenine dinucleotide.; FrdB contains the iron-sulfur centers of the enzyme (amino acid SEQ ID NO: 263; DNA SEQ ID NO: 264); FrdC (amino acid SEQ ID NO: 265; DNA SEQ ID NO: 266) and FrdD (amino acid SEQ ID NO: 267; DNA SEQ ID NO: 268) are integral membrane proteins that bind the catalytic FrdAB domain to the cytoplasmic membrane. The function of fumarate reductase may be eliminated by deletion of any one of the subunits of frdA, B, C, or D, where deletion of frdB is preferred. Deletion of this activity removes the draw for pyruvate for its conversion to fumarate under anaerobic conditions; 3) Alcohol dehydrogenase (EC 1.2.1.10-acetaldehyde dehydrogenase and EC 1.1.1.1-alcohol dehydrogenase), enoded by adhE gene (amino acid SEQ ID NO: 269; DNA SEQ ID NO: 270), that synthesizes ethanol from acetyl-CoA in a two step reaction (both reactions are catalyzed by adhE and both reactions require NADH); and 4) Lactate dehydrogenase (EC 1.1.1.28), encoded by IdhA (amino acid SEQ ID NO: 271; DNA SEQ ID NO: 272) gene, that reduces pyruvate to lactate with oxidation of NADH. Deletion of this enzyme removes the competition for pyuruvate by this enzyme and blocks its conversion to formate and acetyl-CoA. A preferred E. coli host strain is exemplified herein (see Examples) and lacks pflB (encoding for pyruvate formate lyase), frdB (encoding for a subunit of fumarate reductase), IdhA (encoding for lactate dehydrogenase) and adhE (encoding for alcohol dehydrogenase). Any enteric bacterial gene identified as pflB, frdB, IdhA and adhE is a target for modification in the corresponding microorganism to create a strain for the production of isobutanol. In other enteric bacteria, genes encoding pyruvate formate lyase, fumarate reductase, alcohol dehydrogenase, or lactate dehydrogenase such as those having at least about 80-85%, 85%-90%, 90%-95%, or at least about 98% sequence identity to pflB, frdB, IdhA or adhE may be downregulated or disrupted.

[0165] Endogenous lactate dehydrogenase activity in lactic acid bacteria (LAB) converts pyruvate to lactate and is thus involved in byproduct formation. LAB may have one or more genes, typically one, two or three genes, encoding lactate dehydrogenase. For example, Lactobacillus plantarum has three genes encoding lactate dehydrogenase which are named IdhL2 (protein SEQ ID NO: 273, coding region SEQ ID NO: 274), IdhD (protein SEQ ID NO: 275, coding region SEQ ID NO: 276), and IdhL1 (protein SEQ ID NO: 277, coding region SEQ ID NO: 278). In other lactic acid bacteria, genes encoding lactate dehydrogenase such as those having at least about 80-85%, 85%-90%, 90%-95%, or at least about 98% sequence identity to IdhL2, IdhD, and IdhL1 may be downregulated or disrupted.

[0166] Endogenous pyruvate decarboxylase activity in yeast converts pyruvate to acetaldehyde, which is then converted to ethanol or to acetyl-CoA via acetate. Therefore, endogenous pyruvate decarboxylase activity is a target for reduction or elimination of byproduct formation. Yeasts may have one or more genes encoding pyruvate decarboylase. For example, there is one gene encoding pyruvate decarboxylase in Kluyveromyces lactis, while there are three isozymes of pyruvate decarboxylase encoded by the PDC1, PCD5, and PDC6 genes in Saccharomyces cerevisiae, as well as a pyruvate decarboxylase regulatory gene PDC2. Expression of pyruvate decarboxylase from PDC6 is minimal. In the present yeast strains the pyruvate decarboxylase activity is reduced by downregulating or disrupting at least one gene encoding a pyruvate decarboxylase, or a gene regulating pyruvate decarboxylase gene expression. For example, in S. cerevisiae the PDC1 and PDC5 genes, or all three genes, may be disrupted. Alternatively, pyruvate decarboxylase activity may be reduced by disrupting the PDC2 regulatory gene in S. cerevisiae. In other yeasts, genes encoding pyruvate decarboxylase proteins such as those having at least about 80-85%, 85%-90%, 90%-95%, or at least about 98% sequence identity to PDC1 or PDC5 may be downregulated or disrupted. Examples of yeast pyruvate decarboxylase genes or proteins that may be targeted for downregulation or disruption are listed in Table 6 (SEQ ID NOs: 280, 282, 284, 286, 288, 290, 292, 294, and 296).

[0167] Examples of yeast strains with reduced pyruvate decarboxylase activity due to disruption of pyruvate decarboxylase encoding genes have been reported such as for Saccharomyces in Flikweert et al. (Yeast (1996) 12:247-257), for Kluyveromyces in Bianchi et al. (Mol. Microbiol. (1996) 19(1):27-36), and disruption of the regulatory gene in Hohmann, (Mol Gen Genet. (1993) 241:657-666). Saccharomyces strains having no pyruvate decarboxylase activity are available from the ATCC (Accession #200027 and #200028).

### Molecular Manipulations to Produce the Host Strain

[0168] Suitable methods to express, delete/disrupt, down-regulate or up-regulate genes or a set of genes are known to one skilled in the art. Many of the methods are applicable to both bacteria and fungi including directed gene modification as well as random genetic modification followed by screening.

[0169] Typically used random genetic modification methods (reviewed in Miller, J. H. (1992) A Short Course in Bacterial Genetics. Cold Spring Harbor Press, Plainview, N.Y.) include spontaneous mutagenesis, mutagenesis caused by mutator genes, chemical mutagenesis, irradiation with UV or X-rays. Specific methods for creating mutants using radiation or chemical agents are well documented in the art. See, for example: Thomas D. Brock in Biotechnology: A Textbook of Industrial Microbiology, 2nd ed. (1989) Sinauer Associates. Additionally transposon insertions have been introduced into bacteria by phage-mediated transduction and conjugation and into bacteria by transformation. In these cases the transposon expresses a transposase in the recipient that catalyzes gene hopping from the incoming DNA to the recipient genome. The transposon DNA can be naked, incorporated in a phage or plasmid nucleic acid or complexed with a transposase. Most often the replication and/or maintenance of the incoming DNA containing the transposon is prevented, such that genetic selection for a marker on the transposon (most often antibiotic resistance) insures that each recombinant is the result of movement of the transposon from the entering DNA molecule to the recipient genome. An alternative method is one in which transposition is carried out with chromosomal DNA, fragments thereof, or a fragment thereof in vitro, and then the novel insertion allele that has been created is introduced into a recipient cell where it replaces the resident allele by homologous recombination. Transposon insertion may be performed as described in Kleckner and Botstein, J. Mol. Biol. 116:125-159, 1977), or using the Transposome™ system (Epicentre; Madison, Wis.).

[0170] Genetic modification methods include, but are not limited to, deletion of an entire gene or a portion of the gene, inserting a DNA fragment into the gene (in either the promoter or coding region) so that the protein is not expressed or expressed at lower levels, introducing a mutation into the coding region which adds a stop codon or frame shift such that a functional protein is not expressed, and introducing one or more mutations into the coding region to alter amino acids so that a non-functional or a less functional protein is expressed. Some DNA sequences surrounding the coding sequence are useful for modification methods using homologous recombination. For example, in this method gene flanking sequences are placed bounding a selectable marker gene to mediate homologous recombination whereby the marker gene replaces the gene. Also partial gene sequences and flanking sequences bounding a selectable marker gene may be used to mediate homologous recombination whereby the marker gene replaces a portion of the gene. In addition, the selectable marker may be bounded by site-specific recombination sites, so that following expression of the corresponding site-specific recombinase, the resistance gene is excised from the gene without reactivating the latter. The site-specific recombination leaves behind a recombination site which disrupts expression of the protein. The homologous recombination vector may be constructed to also leave a deletion in the gene following excision of the selectable marker, as is well known to one skilled in the art. Moreover, promoter replacement methods may be used to exchange the endogenous transcriptional control elements allowing another means to modulate expression such as described in Yuan et al. (Metab. Eng., 8:79-90, 2006).

[0171] Antisense technology is another method of molecular modification to down-regulate a gene when the sequence of the target gene is known. To accomplish this, a nucleic acid segment from the desired gene is cloned and operably linked to a promoter such that the anti-sense strand of RNA will be transcribed. This construct is then introduced into the host cell and the antisense strand of RNA is produced. Antisense RNA inhibits gene expression by preventing the accumulation of mRNA that encodes the protein of interest. The person skilled in the art will know that special considerations are associated with the use of antisense technologies in order to reduce expression of particular genes. For example, the proper level of expression of antisense genes may require the use of different chimeric genes utilizing different regulatory elements known to the skilled artisan.

[0172] In addition to down-regulate a gene and its corresponding gene product the synthesis of or stability of the transcript may be lessened by mutation. Similarly the efficiency by which a protein is translated from mRNA may be modulated by mutation. All of these methods for molecular manipulation may be readily practiced by one skilled in the art making use of the known sequences encoding proteins. DNA sequences surrounding the coding sequences are also useful in some more methods for molecular manipulations.

[0173] To up-regulate genes and subsequently increase amount and/or activity of gene products additional copies of genes may be introduced into the host. Up-regulation of the desired gene products also can be achieved at the transcriptional level through the use of a stronger promoter (either regulated or constitutive) to cause increased expression, by removing/deleting destabilizing sequences from either the mRNA or the encoded protein, or by adding stabilizing sequences to the mRNA (U.S. Pat. No. 4,910,141). Yet another approach to up-regulate a desired gene and the amount and/or activity of its gene product is to increase the translational efficiency of the encoded mRNAs by replacement of codons in the native coding gene of the gene product with those for optimal gene expression and translation in the selected host microorganism.

[0174] Tables 2-4 provide a listing of genes from various organisms that may be genetically manipulated to modify glucose metabolic pathways according to the teachings herein.

### Isolation of Homologous Genes

[0175] In the process of building an isobutanol pathway or in modifying a glucose metabolic pathway it may be useful to isolate gene homologs based on structure, sequence and function. Methods for identifying and isolating genetic homologs on the basis of sequence are common and well known in the art and include for example 1) methods of nucleic acid hybridization; 2) methods of DNA and RNA amplification, as exemplified by various uses of nucleic acid amplification technologies (e.g., polymerase chain reaction (PCR), Mullis et al., U.S. Pat. No. 4,683,202; ligase chain reaction (LCR), Tabor, S. et al., Proc. Acad. Sci. USA 82:1074. 1985; or strand displacement amplification (SDA), Walker, et al., Proc. Natl. Acad. Sci. U.S.A., 89:392, 1992); and 3) methods of library construction and screening by complementation.

[0176] a) Nucleic acid hybridization. For example, genes encoding similar proteins or polypeptides to genes provided herein could be isolated directly by using all or a portion of the instant nucleic acid fragments as DNA hybridization probes to screen libraries from any desired organism using methodology well known to those skilled in the art. Specific oligonucleotide probes based upon the disclosed nucleic acid sequences can be designed and synthesized by methods known in the art (Maniatis, supra). Moreover, the entire sequences can be used directly to synthesize DNA probes by methods known to the skilled artisan (e.g., random primers DNA labeling, nick translation or end-labeling techniques), or RNA probes using available in vitro transcription systems. In addition, specific primers can be designed and used to amplify a part of (or full-length of) the instant sequences. The resulting amplification products can be labeled directly during amplification reactions or labeled after amplification reactions, and used as probes to isolate full-length DNA fragments by hybridization under conditions of appropriate stringency. The basic components of a nucleic acid hybridization test include a probe, a sample suspected of containing the gene or gene fragment of interest, and a specific hybridization method. Probes are typically single-stranded nucleic acid sequences that are complementary to the nucleic acid sequences to be detected. Probes are “hybridizable” to the nucleic acid sequence to be detected. The probe length can vary from 5 bases to tens of thousands of bases, and will depend upon the specific test to be done. Typically a probe length of about 15 bases to about 30 bases is suitable. Only part of the probe molecule need be complementary to the nucleic acid sequence to be detected. In addition, the complementarity between the probe and the target sequence need not be perfect. Hybridization does occur between imperfectly complementary molecules with the result that a certain fraction of the bases in the hybridized region are not paired with the proper complementary base.

[0177] Hybridization methods are well defined. Typically the probe and sample must be mixed under conditions that will permit nucleic acid hybridization. This involves contacting the probe and sample in the presence of an inorganic or organic salt under the proper concentration and temperature conditions. The probe and sample nucleic acids must be in contact for a long enough time that any possible hybridization between the probe and sample nucleic acid may occur. The concentration of probe or target in the mixture will determine the time necessary for hybridization to occur. The higher the probe or target concentration, the shorter the hybridization incubation time needed. Optionally, a chaotropic agent may be added. The chaotropic agent stabilizes nucleic acids by inhibiting nuclease activity. Furthermore, the chaotropic agent allows sensitive and stringent hybridization of short oligonucleotide probes at room temperature (Van Ness and Chen, Nucl. Acids Res., 19:5143-5151, 1991). Suitable chaotropic agents include guanidinium chloride, guanidinium thiocyanate, sodium thiocyanate, lithium tetrachloroacetate, sodium perchlorate, rubidium tetrachloroacetate, potassium iodide and cesium trifluoroacetate, among others. Typically, the chaotropic agent will be present at a final concentration of about 3 M. If desired, one can add formamide to the hybridization mixture, typically 30-50% (v/v).

[0178] Various hybridization solutions can be employed. Typically, these comprise from about 20 to 60% volume, preferably 30%, of a polar organic solvent. A common hybridization solution employs about 30-50% v/v formamide, about 0.15 to 1 M sodium chloride, about 0.05 to 0.1 M buffers (e.g., sodium citrate, Tris-HCl, PIPES or HEPES (pH range about 6-9)), about 0.05 to 0.2% detergent (e.g., sodium dodecylsulfate), or between 0.5-20 mM EDTA, FICOLL (Pharmacia Inc.) (about 300-500 kD), polyvinylpyrrolidone (about 250-500 kdal) and serum albumin. Also included in the typical hybridization solution will be unlabeled carrier nucleic acids from about 0.1 to 5 mg/mL, fragmented nucleic DNA (e.g., calf thymus or salmon sperm DNA, or yeast RNA), and optionally from about 0.5 to 2% wt/vol glycine. Other additives may also be included, such as volume exclusion agents that include a variety of polar water-soluble or swellable agents (e.g., polyethylene glycol), anionic polymers (e.g., polyacrylate or polymethylacrylate) and anionic saccharidic polymers (e.g., dextran sulfate).

[0179] Nucleic acid hybridization is adaptable to a variety of assay formats. One of the most suitable is the sandwich assay format. The sandwich assay is particularly adaptable to hybridization under non-denaturing conditions. A primary component of a sandwich-type assay is a solid support. The solid support has adsorbed to it or covalently coupled to it immobilized nucleic acid probe that is unlabeled and complementary to one portion of the sequence.

[0180] b) PCR-type amplification techniques: typically in PRC-type amplification methods the primers have different sequences and are not complementary to each other. Depending on the desired test conditions, the sequences of the primers should be designed to provide for both efficient and faithful replication of the target nucleic acid. Methods of PCR primer design are common and well known in the art (Thein and Wallace, “The use of oligonucleotides as specific hybridization probes in the Diagnosis of Genetic Disorders”, in Human Genetic Diseases: A Practical Approach, K. E. Davis Ed., (1986) pp 33-50, IRL: Herndon, Va.; and Rychlik, W., In Methods in Molecular Biology, White, B. A. Ed., (1993) Vol. 15, pp 31-39, PCR Protocols: Current Methods and Applications. Humania: Totowa, N.J.).

[0181] Generally two short segments of the described sequences may be used in polymerase chain reaction protocols to amplify longer nucleic acid fragments encoding homologous genes from DNA or RNA. The polymerase chain reaction may also be performed on a library of cloned nucleic acid fragments wherein the sequence of one primer is derived from the described nucleic acid fragments, and the sequence of the other primer takes advantage of the presence of the polyadenylic acid tracts to the 3′ end of the mRNA precursor encoding some microbial genes.

[0182] Alternatively, the second primer sequence may be based upon sequences derived from the cloning vector. For example, the skilled artisan can follow the RACE protocol (Frohman et al., Proc. Natl. Acad. Sci., USA, 85:8998, 1988) to generate cDNAs by using PCR to amplify copies of the region between a single point in the transcript and the 3′ or 5′ end. Primers oriented in the 3′ and 5′ directions can be designed from the instant sequences. Using commercially available 3′RACE or 5′RACE systems (e.g., BRL, Gaithersburg, Md.), specific 3′ or 5′ cDNA fragments can be isolated (Ohara et al., Proc. Natl. Acad. Sci., USA 86: 5673, 1989; and Loh et al., Science, 243: 217, 1989).

[0183] c) Library construction and screening by complementation: Genomic libraries can also be used to identify functional homologs. For example, genomic DNA from pure or mixed microbial cultures can be purified and fragmented by restriction digest or physical shearing into short segments typically 500 to 5 kb in length. These DNA fragments can be subcloned into bacterial or yeast expression vectors and expressed in host cells. Complementation can then be used to screen and identify functional homologs that either restore growth or a phenotypic condition.

[0184] Within the context of the present invention, it may be useful to modulate the expression of metabolic pathways by any one of the methods described above. For example, the present invention provides methods whereby genes encoding key enzymes in the EDP are introduced into E. coli, Lactobacilli and yeasts for upregulation of these pathways. It will be particularly useful to express these genes in bacteria or yeasts that do not have the EDP pathway and coordinate the expression of these genes, to maximize production of isobutanol using various means for metabolic engineering of the host organism.

[0185] Strains can then be selected and assayed for reduced or increased enzyme expression. If the organism has a means of genetic exchange then genetic crosses may be performed to verify that the effect is due to the observed alteration in the genome.

### Molecular Manipulations in Bacterial Host Cells

[0186] Molecular manipulation of genes may be carried out directly in the bacterial chromosome by any of the methods described herein and/or known to those skilled in the art. Briefly PCR and/or cloning methods well known to one skilled in the art may be used to construct a modified chromosomal segment. The segment may include a deletion, an insertion or a point mutation of a gene or a regulatory region. Alternatively the modification may include a gene encoding a new enzyme activity or an additional copy of a gene encoding an endogenous enzyme activity. Depending on the modification the engineered segment may express, delete/disrupt, down-regulate or up-regulate a gene or set of genes. Insertion of the engineered chromosomal segment may be by any method known to one skilled in the art, such as by phage transduction, conjugation, or plasmid introduction or non-plasmid double or single stranded DNA introduction followed by homologous recombination. Homologous recombination is enabled by a method that introduces homologous sequences to the modified chromosomal segment. The homologous sequences naturally flank the chromosomal segment in the bacterial chromosome, thus providing sequences to direct recombination. The flanking homologous sequences are sufficient to support homologous recombination, as described in Lloyd, R. G., and K. B. Low (Homologous recombination, p. 2236-2255; In F. C. Neidhardt, ed., Escherichia coli and Salmonella: Cellular and Molecular Biology, 1996, ASM Press, Washington, D.C.). Typically homologous sequences used for homologous recombination are over 1 kb in length, but may be as short as 50 or 100 bp. DNA fragments containing the engineered chromosomal segment and flanking homologous sequences may be prepared with defined ends, such as by restriction digestion, or using a method that generates random ends such as sonication. In either case, the DNA fragments carrying the engineered chromosomal segment may be introduced into the target host cell by any DNA uptake method, including for example, electroporation, a freeze-thaw method, or using chemically competent cells. The DNA fragment undergoes homologous recombination which results in replacement of the endogenous chromosomal region of the target host with the engineered chromosomal segment.

[0187] A plasmid may be used to carry the engineered chromosomal segment and flanking sequences into the target host cell for insertion. Typically a non-replicating plasmid is used to promote integration. Introduction of plasmid DNA is as described above.

[0188] In the case of E. coli, homologous recombination may be enhanced by use of bacteriophage homologous recombination systems, such as the bacteriophage lambda Red system (Datsenko and Wanner, Proc. Natl. Acad. Sci. USA, 97: 6640-6645, 2000) and (Ellis et al., Proc. Natl. Acad. Sci. USA, 98: 6742-6746, 2001) or the Rac phage RecE/RecT system (Zhang et al., Nature Biotechnol., 18:1314-1317, 2000). In any of these methods, the homologous recombination results in replacement of the endogenous chromosomal region of the target host with the engineered chromosomal segment.

[0189] Recipient strains with successful insertion of the engineered chromosomal segment may be identified using a marker. Either screening or selection markers may be used, with selection markers being particularly useful. For example, an antibiotic resistance marker may be present in the engineered chromosomal segment, such that when it is transferred to a new host; cells receiving the engineered chromosomal segment can be readily identified by growth on the corresponding antibiotic. Alternatively a screening marker may be used, which is one that confers production of a product that is readily detected. If it is desired that the marker not remain in the recipient strain, it may subsequently be removed such as by using site-specific recombination. In this case site-specific recombination sites are located 5′ and 3′ to the marker DNA sequence such that expression of the recombinase will cause deletion of the marker. Once the mutations have been created the cells must be screened for absence of these specific genes. A number of methods may be used to analyze for this purpose.

[0190] Another method of molecular manipulation to up-regulate a gene or set of genes includes, but is not limited to introducing additional copies of selected genes into the host cell on multicopy plasmids. Vectors or cassettes useful for the transformation of a variety of host cells are common and commercially available from companies such as EPICENTRE® (Madison, Wis.), Invitrogen Corp. (Carlsbad, Calif.), Stratagene (La Jolla, Calif.), and New England Biolabs, Inc. (Beverly, Mass.). Typically the vector or cassette contains sequences directing transcription and translation of the relevant gene, a selectable marker, and sequences allowing autonomous replication or chromosomal integration. Suitable vectors comprise a region 5′ of the gene which harbors transcriptional initiation controls and a region 3′ of the DNA fragment which controls transcriptional termination. Both control regions may be derived from genes homologous to the transformed host cell, although it is to be understood that such control regions may also be derived from genes that are not native to the specific species chosen as a production host.

[0191] Initiation control regions or promoters, which are useful to drive expression of the relevant pathway coding regions in the desired host cell are numerous and familiar to those skilled in the art. Virtually any promoter capable of driving these genetic elements is suitable for the present invention. Particularly useful for expression in E. coli are promoters including, but not limited to, lac, ara, tet, trp, IP_{L}, IP_{R}, T7, tac, and trc. Termination control regions may also be derived from various genes native to the preferred hosts. Optionally, a termination site may be unnecessary, however, it is most preferred if included.

[0192] The genus Lactobacillus belongs to a group of gram positive bacteria that make up the lactic acid bacteria. Many plasmids and vectors used in the transformation of Bacillus subtilis, Enterococcus spp., and lactic acid bacteria may be used for Lactobacillus. Shuttle vectors with two origins of replication and selectable markers which allow for replication and selection in both Escherichia coli and Lactobacillus plantarum are also suitable for this invention. This allows for cloning in E. coli and expression in L. plantarum. Non-limiting examples of suitable vectors include pAMβ1 and derivatives thereof, for example pTRKL1 (LeBlanc and Lee, J. Bacteriol., 157:445-453, 1984); O′Sullivan and Klaenhammer, Gene, 137:227-231, 1993); pMBB1 and pHW800, a derivative of pMBB1 (Wyckoff et al. Appl. Environ. Microbiol. 62:1481-1486, 1996); pMG1, a conjugative plasmid (Tanimoto et al., J. Bacteriol., 184:5800-5804, 2002); pNZ9520 (Kleerebezem et al., Appl. Environ. Microbiol., 63:4581-4584, 1997); pAM401 (Fujimoto et al., Appl. Environ. Microbiol., 67:1262-1267, 2001); and pAT392 (Arthur et al., Antimicrob. Agents Chemother., 38:1899-1903, 1994). Several plasmids from L. plantarum have also been reported (e.g., van Kranenburg R, Golic N, Bongers R, Leer R J, de Vos W M, Siezen R J, Kleerebezem M. Appl. Environ. Microbiol., 7: 1223-1230, 2005). Initiation control regions or promoters, which are useful to drive expression of a coding region in order to up-regulate gene expression in L. plantarum are familiar to those skilled in the art. Some examples include the amy, apr, and npr promoters; nisA promoter (useful for expression Gram-positive bacteria (Eichenbaum et al. Appl. Environ. Microbiol. 64:2763-2769, 1998); and the synthetic P11 promoter (useful for expression in L. plantarum, Rud et al., Microbiology, 152:1011-1019, 2006). In addition, native promoters, such as the IdhL1 promoter, are useful for expression of chimeric genes in L. plantarum.

[0193] Deletion/disruption and down-regulation of a gene or set of genes may be achieved by many methods in L. plantarum. One particular method suitable for this invention utilizes a two-step homologous recombination procedure to yield unmarked deletions as has been previously described (Ferain et al., J. Bacteriol., 176: 596, 1994). The procedure utilizes a shuttle vector in which two segments of DNA containing sequences upstream and downstream of the intended deletion are cloned to provide the regions of homology for the two genetic crossovers. After the plasmid is introduced into the cell, an initial homologous crossover integrates the plasmid into the chromosome. The second crossover event yields either the wild type sequence or the intended gene deletion, which can be screened for by PCR. This procedure may also be used by those skilled in the art for chromosomal integrations and chromosomal site-specific mutagenesis.

### Molecular Manipulations in Fungal Host Cells

[0194] Any bacterial or fungal gene or set of genes of interest may be expressed and up-regulated in a yeast host cell in order to obtain and increase amount and/or activity of the respective gene product. Many molecular methods used for such manipulations are applicable to both bacteria and fungi. However, fungal host cells contain sub-structures, e.g. organelles that provide distinct environments to proteins.

[0195] Consequently, the term “heterologous gene” or “heterologous protein” additionally comprises, but is not limited to, a gene and its gene product that is expressed in a manner differently from a corresponding endogenous gene or gene product, e.g. if the gene product targets a compartment different than the corresponding endogenous gene product in the cell. For example in yeast, endogenous ketol acid reductoisomerase is encoded by ILV5 in the nucleus and the expressed ILV5 protein has a mitochondrial targeting signal sequence such that the protein is localized in the mitochondrion. It is desirable to express ILV5 activity in the cytosol for participation in biosynthetic pathways that are localized in the cytosol. Cytosolic expression of ILV5 in yeast is heterologous expression since the native protein is localized in the mitochondria. For example, heterologous expression of the Saccharomyces cerevisiae ILV5 in S. cerevisiae is obtained by expressing the S. cerevisiae ILV5 coding region with the mitochondrial targeting signal removed, such that the protein remains in the cytosol.

[0196] Molecular manipulation for expressing or up-regulating a gene or set of genes is achieved by transforming the fungal cell with a gene or set of genes comprising a sequence encoding a given protein or set of proteins. The coding region to be expressed may be codon optimized for the target host cell, as well known to one skilled in the art. Methods for molecular manipulation of expression in yeast are known in the art (see for example Methods in Enzymology, Volume 194, Guide to Yeast Genetics and Molecular and Cell Biology (Part A, 2004, Christine Guthrie and Gerald R. Fink (Eds.), Elsevier Academic Press, San Diego, Calif.). Expression of genes in yeast typically utilizes a promoter, operably linked to a coding region of interest, and a transcriptional terminator. A number of yeast promoters can be used in constructing expression cassettes for genes in yeast, including, but not limited to promoters derived from the following genes: CYC1, HIS3, GAL1, GAL10, ADH1, PGK, PHO5, GAPDH, ADC1, TRP1, URA3, LEU2, ENO, TPI, CUP1, FBA, GPD, GPM, TEF1, and AOX1. Suitable transcriptional terminators include, but are not limited to FBAt, GPDt, GPMt, ERG10t, GAL1t, CYC1, and ADH1.

[0197] Suitable promoters, transcriptional terminators, and coding regions may be cloned into E. coli-yeast shuttle vectors, and transformed into yeast cells. These vectors allow strain propagation in both E. coli and yeast strains. Typically the vector used contains a selectable marker and sequences allowing autonomous replication or chromosomal integration in the desired host. Typically used plasmids in yeast are shuttle vectors pRS423, pRS424, pRS425, and pRS426 (American Type Culture Collection, Rockville, Md.), which contain an E. coli replication origin (e.g., pMB1), a yeast 2μorigin of replication, and a marker for nutritional selection. The selection markers for these four vectors are His3 (vector pRS423), Trp1 (vector pRS424), Leu2 (vector pRS425) and Ura3 (vector pRS426). Construction of expression vectors with a chimeric gene encoding the described protein coding region may be performed by either standard molecular cloning techniques in E. coli or by the gap repair recombination method in yeast.

[0198] The gap repair cloning approach takes advantage of the highly efficient homologous recombination in yeast. Typically, a yeast vector DNA is digested (e.g., in its multiple cloning site) to create a “gap” in its sequence. A number of insert DNAs of interest are generated that contain a ≧21 by sequence at both the 5′ and the 3′ ends that sequentially overlap with each other, and with the 5′ and 3′ terminus of the vector DNA. For example, to construct a yeast expression vector for the desired gene a yeast promoter and a yeast terminator are selected for the expression cassette. The promoter and terminator are amplified from the yeast genomic DNA, and Gene X is either PCR amplified from its source organism or obtained from a cloning vector comprising the desired gene sequence. There is at least a 21 by overlapping sequence between the 5′ end of the linearized vector and the promoter sequence, between the promoter and the desired gene, between Gene X and the terminator sequence, and between the terminator and the 3′ end of the linearized vector. The “gapped” vector and the insert DNAs are then co-transformed into a yeast strain and plated on the medium containing the appropriate compound mixtures that allow complementation of the nutritional selection markers on the plasmids. The presence of correct insert combinations can be confirmed by PCR mapping using plasmid DNA prepared from the selected cells. The plasmid DNA isolated from yeast (usually low in concentration) can then be transformed into an E. coli strain, (e.g. TOP10 or DH10B), followed by mini preps and restriction mapping to further verify the plasmid construct. Finally the construct can be verified by sequence analysis.

[0199] Like the gap repair technique, integration into the yeast genome also takes advantage of the homologous recombination system in yeast. Typically, a cassette containing a coding region plus control elements (promoter and terminator) and auxotrophic marker is PCR-amplified with a high-fidelity DNA polymerase using primers that hybridize to the cassette and contain 40-70 base pairs of sequence homology to the regions 5′ and 3′ of the genomic area where insertion is desired. The PCR product is then transformed into yeast and plated on medium containing the appropriate compound mixtures that allow selection for the integrated auxotrophic marker. For example, to integrate “Gene X” into chromosomal location “Y”, the promoter-coding regionX-terminator construct is PCR amplified from a plasmid DNA construct and joined to an autotrophic marker (such as URA3) by either SOE PCR or by common restriction digests and cloning. The full cassette, containing the promoter-coding region X-terminator-URA3 region, is PCR amplified with primer sequences that contain 40-70 by of homology to the regions 5′ and 3′ of location “Y” on the yeast chromosome. The PCR product is transformed into yeast and selected on growth media lacking uracil. Transformants can be verified either by colony PCR or by direct sequencing of chromosomal DNA.

[0200] Molecular manipulation for down-regulation or deletion/disruption of a gene or set of genes may be achieved in any yeast cell that is amenable to genetic manipulation. Examples include yeasts of Saccharomyces, Schizosaccharomyces, Hansenula, Candida, Kluyveromyces, Yarrowia and Pichia. Suitable strains include, but are not limited to, Saccharomyces cerevisiae, Schizosaccharomyces pombe, Kluyveromyces lactis, Kluyveromyces thermotolerans, Candida glabrata, Candida albicans, Pichia stipitis and Yarrowia lipolytica. Particularly suitable is Saccharomyces cerevisiae.

[0201] In any of these yeasts, any endogenous gene or set of genes may be a target for deletion/disruption and/or down-regulation including, for example, phosphofructokinase (PFK1). At least one gene encoding an endogenous phosphofructokinase protein is disrupted, and two or more genes encoding endogenous phosphofructokinase proteins may be disrupted, to reduce phosphofructokinase protein expression.

[0202] Because fungal genes are well known, and because of the prevalence of genomic sequencing, additional suitable PFK1 may be readily identified for deletion/disruption and down-regulation by one skilled in the art on the basis of sequence similarity using bioinformatics approaches. Typically BLAST (described above) searching of publicly available databases with known PFK1 amino acid sequences, such as those provided herein, is used to identify PFK1 and their encoding sequences that may be targeted for inactivation in the present strains. For example, PFK1 proteins having amino acid sequence identities of at least about 70-75%, 75%-80%, 80-85%, 85%-90%, 90%-95% and at least about 98% sequence identity to any of the PFK1 proteins in Table 4 (SEQ ID NOs:164,166,172,174, and 176) may be inactivated in the present strains. Identities are based on the ClustalW method of alignment using the default parameters of GAP PENALTY=10, GAP LENGTH PENALTY=0.1, and Gonnet 250 series of protein weight matrix.

[0203] In addition, mutagenesis can also be used for expression, up-regulation, down-regulation or deletion/disruption of a gene or set of genes in fungal host cells. Methods for creating genetic mutations are common and well known in the art and may be applied to the exercise of creating mutants. Commonly used random genetic modification methods (reviewed in Methods in Yeast Genetics, 2005, Cold Spring Harbor Laboratory Press, Cold Spring Harbor, N.Y.) include spontaneous mutagenesis, mutagenesis caused by mutator genes, chemical mutagenesis, irradiation with UV or Xrays, or transposon mutagenesis. Chemical mutagenesis of yeast commonly involves treatment of yeast cells with one of the following DNA mutagens: ethyl methanesulfonate (EMS), nitrous acid, diethyl sulfate, or N-methyl-N′-nitro-30 N-nitroso-guanidine (MNNG). These methods of mutagenesis have been reviewed in Spencer et al (Mutagenesis in Yeast, 1996, Yeast Protocols: Methods in Cell and Molecular Biology. Humana Press, Totowa, N.J.). Chemical mutagenesis with EMS may be performed as described in Methods in Yeast Genetics, 2005, Cold Spring Harbor Laboratory Press, Cold Spring Harbor, N.Y. Irradiation with ultraviolet (UV) light or X-rays can also be used to produce random mutagenesis in yeast cells. The primary effect of mutagenesis by UV irradiation is the formation of pyrimidine dimers which disrupt the fidelity of DNA replication. Protocols for UV-mutagenesis of yeast can be found in Spencer et al (Mutagenesis in Yeast, 1996, Yeast Protocols: Methods in Cell and Molecular Biology. Humana Press, Totowa, N.J.). Introduction of a mutator phenotype can also be used to generate random chromosomal mutations in yeast. Common mutator phenotypes can be obtained through disruption of one or more of the following genes: PMS1, MAGI, RAD18 or RAD51. Restoration of the non-mutator phenotype can be easily obtained by insertion of the wildtype allele. Collections of modified cells produced from any of these or other known random mutagenesis processes may be screened for reduced enzyme activity.

Construction of an E. coli Production Host of the Invention

[0204] Particularly suitable in the present invention are members of the enteric class of bacteria. Enteric bacteria are members of the family Enterobacteriaceae and include such members as Escherichia, Salmonella, and Shigella.

[0205] One aspect of the invention includes optimization of isobutanol production in E. coli by an enhanced EDP. Methods for optimization of isobutanol production by an enhanced EDP in E. coli include: 1) expression and up-regulation of a set of genes that encodes enzymes of an isobutanol production pathway; 2) expression and/or up-regulation of a gene or set of genes the encodes preferred enzyme(s) of an enhanced EDP 3) decreasing flux through competing carbon-metabolizing pathways in order to achieve e.g. a diminished EMP and a diminished oxidative PPP using, for example, molecular manipulations described herein to disrupt and/or down-regulate a gene or set of genes and the corresponding gene product(s) 4) preventing the loss of carbon and redox metabolites like e.g. NADPH through NAD reduction by disrupting or down-regulating the soluble transhydrogenase reaction (EC number 1.6.1.1).

[0206] Methods for gene expression and creation of mutations in Enterobacteriaceae such as E. coli are well known in the art. Suitable isobutanol pathway genes and genetic constructs are provided herein, as elaborated in the section on “isobutanol biosynthetic pathways” and in the Examples. The genes as well as the plasmids and regulatory backbone can easily be replaced by and/or augmented with alternatives by one skilled in the art using methods and tools known and/or described herein, in order to provide an alternative functional isobutanol pathway. Genes of an isobutanol biosynthetic pathway may be isolated from various sources and cloned into various vectors as described in Examples 1, 2, 9, 10, 11, 12, and 14 of U.S. Patent Application Publication No. 20070092957, incorporated herein by reference.

[0207] Since E. coli possesses all the required genes for a functional EDP in its genome, up-regulation of endogenous EDP genes results in an enhanced EDP. Alternatively, an enhanced EDP can be accomplished through the expression and up-regulation of heterologous genes of the set of genes encoding EDP activities, comprising glucose-6-phosphate dehydrogenase reaction (EC 1.1.1.49), 6-phosphogluconolactonase reaction (EC 3.1.1.31), phosphogluconate dehydratase reaction (EC 4.2.1.12), and 2-dehydro-3-deoxy-phosphogluconate aldolase reaction (EC 4.1.2.14) as elaborated on in the following. Activity from heterologous EDP genes can either replace or augment activity from endogenous EDP genes.

[0208] Genes that encode EDP activities such as glucose-6-phosphate dehydrogenase reaction (EC 1.1.1.49) are preferably chosen from either Aspergillus niger, specifically GenBank No: CAA61194.1 (SEQ ID NO:117), Aspergillus nidulans, specifically GenBank No: XP_{—}660585.1 (SEQ ID NO:119), Schizosaccharomyces pombe, specifically GenBank Nos: NP_{—}587749.1 (SEQ ID NO:123), or NP_{—}593614.1 (SEQ ID NO:124), or NP_{—}593344.2 (SEQ ID NO:121), Escherichia coli, specifically GenBank No: NP_{—}416366.1 (SEQ ID NO:127), Lactobacillus plantarum, specifically GenBank No: NP_{—}786078.1 (SEQ ID NO:131), or Saccharomyces cerevisiae, specifically GenBank No: NP_{—}014158.1 (SEQ ID NO:133), and are referred to as edp1.

[0209] Genes that encode EDP activities such as 6-phosphogluconolactonase reaction (EC 3.1.1.31) are preferably chosen from either Escherichia coli, specifically GenBank No: NP_{—}415288.1 (SEQ ID NO:105), Lactobacillus plantarum, specifically GenBank No: NP_{—}785709.1 (SEQ ID NO:111), Saccharomyces cerevisiae, specifically GenBank No: NP_{—}011764.1 (SEQ ID NO:107) NP_{—}012033.2 (SEQ ID NO:190), and Zymomonas mobilis, specifically GenBank No: YP_{—}163213.1 (SEQ ID NO:113) and AE008692 (SEQ ID NO:113) and are referred to as edp2.

[0210] Genes that encode EDP activities such as phosphogluconate dehydratase reaction (EC 4.2.1.12) are preferably chosen from either Zymomonas mobilis, specifically GenBank No: YP_{—}162103.1 (SEQ ID NO:135), Pseudomonas putida, specifically GenBank No: NP_{—}743171.1 (SEQ ID NO:137), or Escherichia coli, specifically GenBank No: NP_{—}416365.1 (SEQ ID NO:139), and are referred to as edp3.

[0211] Genes that encode EDP activities such as 2-dehydro-3-deoxy-phosphogluconate aldolase reaction (EC 4.1.2.14) are preferably chosen from either Azotobacter vinelandii, specifically GenBank Nos ZP_{—}00417447.1 (SEQ ID NO:194), ZP_{—}00415409.1 (SEQ ID NO: 196), ZP_{—}00416840.1 (SEQ ID NO:198), or ZP_{—}00419301.1 (SEQ ID NO:200), Pseudomonas putida, specifically GenBank No: NP_{—}743185.1 (SEQ ID NO:202), Pseudomonas fluorescens, specifically GenBank No: YP_{—}261692.1 (SEQ ID NO:204), Zymomonas mobilis, specifically GenBank No: YP_{—}162732.1 (SEQ ID NO:206), or Escherichia coli, specifically GenBank No: NP_{—}416364.1 (SEQ ID NO:208), and are referred to as edp4.

[0212] Decreasing flux through competing carbon-metabolizing pathways is achieved through e.g. the disruption or down-regulation of EMP- and PPP-specific genes and their gene products. To diminish oxidative PPP, e.g. the 6-phosphogluconate dehydrogenase activity in E. coli encoded by the gnd gene (SEQ ID NO: 143), is down-regulated or disrupted. By this means Zhao et al. (Zhao, Baba et al., Appl Microbiol Biotechnol 64(1): 91-8) were able to increase relative flux through EDP from 0% to 10%.

[0213] To decrease flux through EMP in E. coli, pgi (SEQ ID NO: 155) is down-regulated or deleted (Canonaco, Hess et al. 2001, FEMS Microbiol Lett 204(2): 247-52). Alternatively, flux through 6-phosphofructokinase reaction, converting fructose-6-phosphate to fructose-1,6-bisphosphate is reduced or completely eliminated. In E. coli, this reaction is catalyzed by two iso-enzymes, encoded by the genes pfkA (SEQ ID NO: 165) and pfkB (SEQ ID NO: 163). Diminishing or completely eliminating flux through 6-phosphofructokinase reaction is achieved by deletion and/or down-regulation of at least one, preferably both of these iso-enzymes. Alternatively, rate of the fructose-bisphosphate aldolase reaction is diminished or completely eliminated through the down-regulation and/or deletion of at least one, preferably both iso-enzymes known to catalyze the fructose-bisphosphate aldolase reaction, encoded by the genes fbaA (SEQ ID NO:179) and fbaB (SEQ ID NO: 177) in E. coli. However, reduced or eliminated fructose-bisphosphate aldolase reaction leads to elevated levels of fructose-1,6-bisphosphate in the cells that was found to activate flux through EMP enzymes, but inhibit flux through competing pathways like e.g. PPP and EDP (Kirtley, M. E. et al., Mol. Cell. Biochem., 18: 141-149, 1977). Consequently, down-regulation and/or deletion of 6-phosphofructokinase reaction, converting fructose-6-phosphate to fructose-1,6-bisphosphate, in conjunction with diminishing or complete elimination of the fructose-bisphosphate aldolase reaction at the same time is desirable. In E. coli, this is achieved by the down-regulation and/or deletion of at least two, preferably more genes of the gene set comprising pfkA, pfkB, fbaA and fbaB. Decreasing flux through the competing carbon-metabolizing pathways EMP- and oxidative PPP can be achieved through the disruption or down-regulation of one or more genes of the gene set comprising pgi, pfkA, pfkB, fbaA, fbaB and gnd.

[0214] Another aspect of the invention addresses optimization of isobutanol production through reducing the use of redox metabolites like NADPH in reactions other than isobutanol biosynthesis. This is achieved by for example reducing or completely eliminating flux through soluble transhydrogenase, in E. coli achieved through the down-regulation and/or disruption of the sthA gene.

[0215] E. coli genotypes provided herein include the following, with and without up-regulated endogenous EDP pathway genes: E. coli K12 pTrc99A::budB-ilvC-ilvD-kivD-sadB, E. coli K12 ΔpfkA pTrc99A::budB-ilvC-ilvD-kivD-sadB, E. coli K12 ΔpfkB pTrc99A::budB-ilvC-ilvD-kivD-sadB, E. coli K12 ΔfbaA pTrc99A::budB-ilvC-ilvD-kivD-sadB, E. coli K12 ΔfbaB pTrc99A::budB-ilvC-ilvD-kivD-sadB, E. coli K12 ΔsthA pTrc99A::budB-ilvC-ilvD-kivD-sadB, E. coli K12 Δgnd pTrc99A::budB-ilvC-ilvD-kivD-sadB, E. coli K12 pCL1925-edp1 pTrc99A::budB-ilvC-ilvD-kivD-sadB, E. coli K12 pCL1925-edp2 pTrc99A::budB-ilvC-ilvD-kivD-sadB, E. coli K12 pCL1925-edp3 pTrc99A::budB-ilvC-ilvD-kivD-sadB, E. coli K12 pCL1925-edp4 pTrc99A::budB-ilvC-ilvD-kivD-sadB, E. coli K12 ΔpfkA ΔpfkB pTrc99A::budB-ilvC-ilvD-kivD-sadB, E. coli K12 ΔpfkA ΔfbaA pTrc99A::budB-ilvC-ilvD-kivD-sadB, E. coli K12 ΔpfkA ΔfbaB pTrc99A::budB-ilvC-ilvD-kivD-sadB, E. coli K12 ΔpfkA ΔsthA pTrc99A::budB-ilvC-ilvD-kivD-sadB, E. coli K12 ΔpfkA Δgnd pTrc99A::budB-ilvC-ilvD-kivD-sadB, E. coli K12 ΔpfkA pCL1925-edp1 pTrc99A::budB-ilvC-ilvD-kivD-sadB, E. coli K12 ΔpfkA pCL1925-edp2 pTrc99A::budB-ilvC-ilvD-kivD-sadB, E. coli K12 ΔpfkA pCL1925-edp3 pTrc99A::budB-ilvC-ilvD-kivD-sadB, E. coli K12 ΔpfkA pCL1925-edp4 pTrc99A::budB-ilvC-ilvD-kivD-sadB, E. coli K12 ΔpfkA ΔpfkB ΔfbaA pTrc99A::budB-ilvC-ilvD-kivD-sadB, E. coli K12 ΔpfkA ΔpfkB ΔfbaB pTrc99A::budB-ilvC-ilvD-kivD-sadB, E. coli K12 ΔpfkA ΔpfkB ΔsthA pTrc99A::budB-ilvC-ilvD-kivD-sadB, E. coli K12 ΔpfkA ΔpfkB Δgnd pTrc99A::budB-ilvC-ilvD-kivD-sadB, E. coli K12 ΔpfkA ΔpfkB pCL1925-edp1 pTrc99A::budB-ilvC-ilvD-kivD-sadB, E. coli K12 ΔpfkA ΔpfkB pCL1925-edp2 pTrc99A::budB-ilvC-ilvD-kivD-sadB, E. coli K12 ΔpfkA ΔpfkB pCL1925-edp3 pTrc99A::budB-ilvC-ilvD-kivD-sadB, E. coli K12 ΔpfkA ΔpfkB pCL1925-edp4 pTrc99A::budB-ilvC-ilvD-kivD-sadB, E. coli K12 ΔpfkA ΔpfkB ΔfbaA ΔfbaB pTrc99A::budB-ilvC-ilvD-kivD-sadB, E. coli K12 ΔpfkA ΔpfkB ΔfbaA ΔsthA pTrc99A::budB-ilvC-ilvD-kivD-sadB, E. coli K12 ΔpfkA ΔpfkB ΔfbaA Δgnd pTrc99A::budB-ilvC-ilvD-kivD-sadB, E. coli K12 ΔpfkA ΔpfkB ΔfbaA pCL1925-edp1 pTrc99A::budB-ilvC-ilvD-kivD-sadB, E. coli K12 ΔpfkA ΔpfkB ΔfbaA pCL1925-edp2 pTrc99A::budB-ilvC-ilvD-kivD-sadB, E. coli K12 ΔpfkA ΔpfkB ΔfbaA pCL1925-edp3 pTrc99A::budB-ilvC-ilvD-kivD-sadB, E. coli K12 ΔpfkA ΔpfkB ΔfbaA pCL1925-edp4 pTrc99A::budB-ilvC-ilvD-kivD-sadB, E. coli K12 ΔpfkA ΔpfkB ΔfbaA ΔfbaB ΔsthA pTrc99A::budB-ilvC-ilvD-kivD-sadB, E. coli K12 ΔpfkA ΔpfkB ΔfbaA ΔfbaB Δgnd pTrc99A::budB-ilvC-ilvD-kivD-sadB, E. coli K12 ΔpfkA ΔpfkB ΔfbaA ΔfbaB pCL1925-edp1 pTrc99A::budB-ilvC-ilvD-kivD-sadB, E. coli K12 ΔpfkA ΔpfkB ΔfbaA ΔfbaB pCL1925-edp2 pTrc99A::budB-ilvC-ilvD-kivD-sadB, E. coli K12 ΔpfkA ΔpfkB ΔfbaA ΔfbaB pCL1925-edp3 pTrc99A::budB-ilvC-ilvD-kivD-sadB, E. coli K12 ΔpfkA ΔpfkB ΔfbaA ΔfbaB pCL1925-edp4 pTrc99A::budB-ilvC-ilvD-kivD-sadB, E. coli K12 ΔpfkA ΔpfkB ΔfbaA ΔfbaB ΔsthA Δgnd pTrc99A::budB-ilvC-ilvD-kivD-sadB, E. coli K12 ΔpfkA ΔpfkB ΔfbaA ΔfbaB ΔsthA pCL1925-edp1 pTrc99A::budB-ilvC-ilvD-kivD-sadB, E. coli K12 ΔpfkA ΔpfkB ΔfbaA ΔfbaB ΔsthA pCL1925-edp2 pTrc99A::budB-ilvC-ilvD-kivD-sadB, E. coli K12 ΔpfkA ΔpfkB ΔfbaA ΔfbaB ΔsthA pCL1925-edp3 pTrc99A::budB-ilvC-ilvD-kivD-sadB, E. coli K12 ΔpfkA ΔpfkB ΔfbaA ΔfbaB ΔsthA pCL1925-edp4 pTrc99A::budB-ilvC-ilvD-kivD-sadB, E. coli K12 ΔpfkA ΔpfkB ΔfbaA ΔfbaB ΔsthA Δgnd pCL1925-edp1 pTrc99A::budB-ilvC-ilvD-kivD-sadB, E. coli K12 ΔpfkA ΔpfkB ΔfbaA ΔfbaB ΔsthA Δgnd pCL1925-edp2 pTrc99A::budB-ilvC-ilvD-kivD-sadB, E. coli K12 ΔpfkA ΔpfkB ΔfbaA ΔfbaB ΔsthA Δgnd pCL1925-edp3 pTrc99A::budB-ilvC-ilvD-kivD-sadB, E. coli K12 ΔpfkA ΔpfkB ΔfbaA ΔfbaB ΔsthA Δgnd pCL1925-edp4 pTrc99A::budB-ilvC-ilvD-kivD-sadB, E. coli K12 ΔpfkA ΔpfkB ΔfbaA ΔfbaB ΔsthA Δgnd pCL1925-edp1-edp2 pTrc99A::budB-ilvC-ilvD-kivD-sadB, E. coli K12 ΔpfkA ΔpfkB ΔfbaA ΔfbaB ΔsthA Δgnd pCL1925-edp1-edp3 pTrc99A::budB-ilvC-ilvD-kivD-sadB, E. coli K12 ΔpfkA ΔpfkB ΔfbaA ΔfbaB ΔsthA Δgnd pCL1925-edp1-edp4 pTrc99A::budB-ilvC-ilvD-kivD-sadB, E. coli K12 ΔpfkA ΔpfkB ΔfbaA ΔfbaB ΔsthA Δgnd pCL1925-edp1-edp2-edp3 pTrc99A::budB-ilvC-ilvD-kivD-sadB, E. coli K12 ΔpfkA ΔpfkB ΔfbaA ΔfbaB ΔsthA Δgnd pCL1925-edp1-edp2-edp4 pTrc99A::budB-ilvC-ilvD-kivD-sadB, E. coli K12 ΔpfkA ΔpfkB ΔfbaA ΔfbaB ΔsthA Δgnd pCL1925-edp1-edp2-edp3-edp4 pTrc99A::budB-ilvC-ilvD-kivD-sadB, E. coli K12 Δpgi pTrc99A::budB-ilvC-ilvD-kivD-sadB, E. coli K12 Δpgi ΔsthA pTrc99A::budB-ilvC-ilvD-kivD-sadB, E. coli K12 Δpgi Δgnd pTrc99A::budB-ilvC-ilvD-kivD-sadB, E. coli K12 Δpgi pCL1925-edp1 pTrc99A::budB-ilvC-ilvD-kivD-sadB, E. coli K12 Δpgi pCL1925-edp2 pTrc99A::budB-ilvC-ilvD-kivD-sadB, E. coli K12 Δpgi pCL1925-edp3 pTrc99A::budB-ilvC-ilvD-kivD-sadB, E. coli K12 Δpgi pCL1925-edp4 pTrc99A::budB-ilvC-ilvD-kivD-sadB, E. coli K12 Δpgi ΔsthA Δgnd pTrc99A::budB-ilvC-ilvD-kivD-sadB, E. coli K12 Δpgi ΔsthA pCL1925-edp1 pTrc99A::budB-ilvC-ilvD-kivD-sadB, E. coli K12 Δpgi ΔsthA pCL1925-edp2 pTrc99A::budB-ilvC-ilvD-kivD-sadB, E. coli K12 Δpgi ΔsthA pCL1925-edp3 pTrc99A::budB-ilvC-ilvD-kivD-sadB, E. coli K12 Δpgi ΔsthA pCL1925-edp4 pTrc99A::budB-ilvC-ilvD-kivD-sadB, E. coli K12 Δpgi ΔsthA Δgnd pCL1925-edp1 pTrc99A::budB-ilvC-ilvD-kivD-sadB, E. coli K12 Δpgi ΔsthA Δgnd pCL1925-edp2 pTrc99A::budB-ilvC-ilvD-kivD-sadB, E. coli K12 Δpgi ΔsthA Δgnd pCL1925-edp3 pTrc99A::budB-ilvC-ilvD-kivD-sadB, E. coli K12 Δpgi ΔsthA Δgnd pCL1925-edp4 pTrc99A::budB-ilvC-ilvD-kivD-sadB, E. coli K12 Δpgi ΔsthA Δgnd pCL1925-edp1-edp2 pTrc99A::budB-ilvC-ilvD-kivD-sadB, E. coli K12 Δpgi ΔsthA Δgnd pCL1925-edp1-edp3 pTrc99A::budB-ilvC-ilvD-kivD-sadB, E. coli K12 Δpgi ΔsthA Δgnd pCL1925-edp1-edp4 pTrc99A::budB-ilvC-ilvD-kivD-sadB, E. coli K12 Δpgi ΔsthA Δgnd pCL1925-edp1-edp2-edp3 pTrc99A::budB-ilvC-ilvD-kivD-sadB, E. coli K12 Δpgi ΔsthA Δgnd pCL1925-edp1-edp2-edp4 pTrc99A::budB-ilvC-ilvD-kivD-sadB, E. coli K12 Δpgi ΔsthA Δgnd pCL1925-edp1-edp2-edp3-edp4 pTrc99A::budB-ilvC-ilvD-kivD-sadB, E. coli K12 Δzwf pCL1925-edp1 pTrc99A::budB-ilvC-ilvD-kivD-sadB, E. coli K12 Δzwf ΔpfkA pCL1925-edp1 pTrc99A::budB-ilvC-ilvD-kivD-sadB, E. coli K12 Δzwf ΔpfkA ΔpfkB pCL1925-edp1 pTrc99A::budB-ilvC-ilvD-kivD-sadB, E. coli K12 Δzwf ΔpfkA ΔpfkB ΔfbaA pCL1925-edp1 pTrc99A::budB-ilvC-ilvD-kivD-sadB, E. coli K12 Δzwf ΔpfkA ΔpfkB ΔfbaA ΔfbaB pCL1925-edp1 pTrc99A::budB-ilvC-ilvD-kivD-sadB, E. coli K12 Δzwf ΔpfkA ΔpfkB ΔfbaA ΔfbaB ΔsthA pCL1925-edp1 pTrc99A::budB-ilvC-ilvD-kivD-sadB, E. coli K12 Δzwf ΔpfkA ΔpfkB ΔfbaA ΔfbaB ΔsthA Δgnd pCL1925-edp1 pTrc99A::budB-ilvC-ilvD-kivD-sadB, E. coli K12 Δzwf ΔpfkA ΔpfkB ΔfbaA ΔfbaB ΔsthA Δgnd pCL1925-edp1-edp2 pTrc99A::budB-ilvC-ilvD-kivD-sadB, E. coli K12 Δzwf ΔpfkA ΔpfkB ΔfbaA ΔfbaB ΔsthA Δgnd pCL1925-edp1-edp3 pTrc99A::budB-ilvC-ilvD-kivD-sadB, E. coli K12 Δzwf ΔpfkA ΔpfkB ΔfbaA ΔfbaB ΔsthA Δgnd pCL1925-edp1-edp4 pTrc99A::budB-ilvC-ilvD-kivD-sadB, E. coli K12 Δzwf ΔpfkA ΔpfkB ΔfbaA ΔfbaB ΔsthA Δgnd pCL1925-edp1-edp2-edp3 pTrc99A::budB-ilvC-ilvD-kivD-sadB, E. coli K12 Δzwf ΔpfkA ΔpfkB ΔfbaA ΔfbaB ΔsthA Δgnd pCL1925-edp1-edp2-edp4 pTrc99A::budB-ilvC-ilvD-kivD-sadB, E. coli K12 Δzwf ΔpfkA ΔpfkB ΔfbaA ΔfbaB ΔsthA Δgnd pCL1925-edp1-edp2-edp3-edp4 pTrc99A::budB-ilvC-ilvD-kivD-sadB, E. coli K12 Δzwf Δpgi pCL1925-edp1 pTrc99A::budB-ilvC-ilvD-kivD-sadB, E. coli K12 Δzwf Δpgi ΔsthA pCL1925-edp1 pTrc99A::budB-ilvC-ilvD-kivD-sadB, E. coli K12 Δzwf Δpgi ΔsthA Δgnd pCL1925-edp1 pTrc99A::budB-ilvC-ilvD-kivD-sadB, E. coli K12 Δzwf Δpgi ΔsthA Δgnd pCL1925-edp1-edp2 pTrc99A::budB-ilvC-ilvD-kivD-sadB, E. coli K12 Δzwf Δpgi ΔsthA Δgnd pCL1925-edp1-edp3 pTrc99A::budB-ilvC-ilvD-kivD-sadB, E. coli K12 Δzwf Δpgi ΔsthA Δgnd pCL1925-edp1-edp4 pTrc99A::budB-ilvC-ilvD-kivD-sadB, E. coli K12 Δzwf Δpgi ΔsthA Δgnd pCL1925-edp1-edp2-edp3 pTrc99A::budB-ilvC-ilvD-kivD-sadB, E. coli K12 Δzwf Δpgi ΔsthA Δgnd pCL1925-edp1-edp2-edp4 pTrc99A::budB-ilvC-ilvD-kivD-sadB, E. coli K12 Δzwf Δpgi ΔsthA Δgnd pCL1925-edp1-edp2-edp3-edp4 pTrc99A::budB-ilvC-ilvD-kivD-sadB.

Construction of a S. cerevisiae Production Host of the Invention

[0216] Optimization of isobutanol production by a functional EDP in S. cerevisiae is achieved through following three means: 1) expression and up-regulation of a set of genes that encodes enzymes of an isobutanol production pathway; 2) expression and up-regulation of a set of genes that encodes EDP enzymes; 3) decreasing flux through competing carbon-metabolizing pathways in order to achieve e.g. a diminished EMP and/or a diminished oxidative PPP.

[0217] Methods for gene expression in Saccharomyces cerevisiae are known in the art (see for example “Methods in Enzymology”, Volume 194, Guide to Yeast Genetics and Molecular and Cell Biology, (Part A, 2004, Christine Guthrie and Gerald R. Fink (eds.), Elsevier Academic Press, San Diego, Calif.). In brief, expression of genes in yeast typically utilizes a promoter, followed by the gene of interest, and a transcriptional terminator. A number of yeast promoters can be used in constructing expression cassettes for genes encoding an isobutanol biosynthetic pathway, including, but not limited to constitutive promoters FBA, GPD, ADH1, and GPM, and the inducible promoters GAL1, GAL10, and CUP1. Suitable transcriptional terminators include, but are not limited to FBAt, GPDt, GPMt, ERG10t, GAL1t, CYC1, and ADH1. For example, suitable promoters, transcriptional terminators, and the genes of an isobutanol biosynthetic pathway may be cloned into E. coli-yeast shuttle vectors as described in Example 17 of U.S. Patent Application Publication No. 20070092957 which is incorporated by reference herein. Since S. cerevisiae lacks the genes for phophogluconate dehydratase (E.C. 4.2.1.12) and 2-dehydro-3-deoxy-phosphogluconate aldolase (E.C. 4.1.2.14), heterogenous genes that encode phosphogluconate dehydratase (E.C. 4.2.1.12), referred to and afore defined as edp3, and 2-dehydro-3-deoxy-phosphogluconate aldolase (E.C. 4.1.2.14), referred to and afore defined as edp4, can be introduced and expressed in S. cerevisiae (FIG. 4). Additionally, either endogenous genes for glucose-6-phosphate dehydrogenase (E.C. 1.1.1.49) and 6-phosphogluconolactonase (E.C. 3.1.1.31) can be upregulated or activity of their gene products can be augmented and/or replaced by expression and/or upregulation of a heterologues gene or set of genes from the set of genes encoding glucose-6-phosphate dehydrogenase (E.C. 1.1.1.49) and 6-phosphogluconolactonase (E.C. 3.1.1.31), referred to and afore defined as edp1 and edp2 and encoding preferred EDP enzymes, respectively.

[0218] Decreasing flux through competing carbon-metabolizing pathways is achieved through the disruption and/or down-regulation of EMP- and PPP-specific genes and their gene products. To diminish oxidative PPP, e.g. the 6-phosphogluconate dehydrogenase activity in S. cerevisiae catalyzed by two isoenzymes encoded by the GND1 (SEQ ID NO: 149, genomic SEQ ID NO: 327) and GND2 (SEQ ID NO: 147, genomic SEQ ID NO: 328) genes, is reduced or completely eliminated by down-regulation and/or deletion of at least one, preferably both of the genes.

[0219] To diminish EMP in S. cerevisiae, the gene PGI1 (SEQ ID NO: 158), encoding glucose-6-phosphate isomerase (E.C. 5.3.1.9), is down-regulated or deleted.

[0220] Alternatively, flux through 6-phosphofructo-1-kinase reaction (E.C. 2.7.1.11), converting fructose-6-phosphate to fructose-1,6-bisphosphate is reduced or completely eliminated.

[0221] In S. cerevisiae, this reaction is catalyzed by two iso-enzymes, encoded by the genes PFK1 (SEQ ID NO: 171, genomic SEQ ID NO: 324) and PFK2 (SEQ ID NO: 173, genomic SEQ ID NO: 325). Diminishing or completely eliminating flux through 6-phosphofructokinase reaction is achieved by either deletion or down-regulation of at least one, preferably both of these genes. Alternatively, rate of the fructose-bisphosphate aldolase reaction (E. C. 4.1.2.13) is diminished or completely eliminated through the down-regulation or deletion of gene FBA1 (SEQ ID NO: 185; genomic SEQ ID NO: 326) in S. cerevisiae. However, reduced or eliminated fructose-bisphosphate aldolase reaction leads to elevated levels of fructose-1,6-bisphosphate in the cells that was found to activate flux through EMP enzymes, but inhibit flux through competing pathways like e.g. oxidative PPP (Kirtley, M. E. et al., supra). Consequently, deletion of 6-phosphofructokinase reaction (E.C. 2.7.1.11), converting fructose-6-phosphate to fructose-1,6-bisphosphate, in conjunction with reduction or complete elimination of the fructose-bisphosphate aldolase reaction (E. C. 4.1.2.13) at the same time is another favorable teaching of the patent to optimize isobutanol production through enhancement of the EDP. In S. cerevisiae, this is achieved by the down-regulation and/or deletion of at least two, preferably more of the gene set comprising PFK1, PFK2 and FBA1. Provided herein is a method of decreasing flux through the competing carbon-metabolizing pathways EMP- and PPP can be achieved through the disruption or down-regulation of one or more genes of the gene set comprising PGI1, PFK1, PFK2, FBA1, GND1 and GND2.

[0222] Provided herein are genotypes in S. cerevisiae including: S. cerevisiae pRS411::edp3-edp4 pRS423::CUP1 p-alsS+FBAp-ILV3 pHR81::FBAp-ILV5+GPMp-kivD, S. cerevisiae ΔPFK1 pRS411::edp3-edp4 pRS423::CUP1p-alsS+FBAp-ILV3 pHR81::FBAp-ILV5+GPMp-kivD, S. cerevisiae ΔPFK2 pRS411::edp3-edp4 pRS423::CUP1p-alsS+FBAp-ILV3 pHR81::FBAp-ILV5+GPMp-kivD, S. cerevisiae ΔFBA1 pRS411::edp3-edp4 pRS423::CUP1p-alsS+FBAp-ILV3 pHR81::FBAp-ILV5+GPMp-kivD, S. cerevisiae ΔGND1 pRS411::edp3-edp4 pRS423::CUP1p-alsS+FBAp-ILV3 pHR81::FBAp-ILV5+GPMp-kivD, S. cerevisiae ΔGND2 pRS411::edp3-edp4 pRS423::CUP1p-alsS+FBAp-ILV3 pHR81::FBAp-ILV5+GPMp-kivD, S. cerevisiae pRS411::edp3-edp4-edp1 pRS423::CUP1p-alsS+FBAp-ILV3 pHR81::FBAp-ILV5+GPMp-kivD, S. cerevisiae pRS411::edp3-edp4-edp2 pRS423::CUP1p-alsS+FBAp-ILV3 pHR81::FBAp-ILV5+GPMp-kivD, S. cerevisiae ΔPFK1 ΔPFK2 pRS411::edp3-edp4 pRS423::CUP1p-alsS+FBAp-ILV3 pHR81::FBAp-ILV5+GPMp-kivD, S. cerevisiae ΔPFK1 ΔFBA1 pRS411::edp3-edp4 pRS423::CUP1p-alsS+FBAp-ILV3 pHR81::FBAp-ILV5+GPMp-kivD, S. cerevisiae ΔPFK1 ΔGND1 pRS411::edp3-edp4 pRS423::CUP1p-alsS+FBAp-ILV3 pHR81::FBAp-ILV5+GPMp-kivD, S. cerevisiae ΔPFK1 ΔGND2 pRS411::edp3-edp4 pRS423::CUP1p-alsS+FBAp-ILV3 pHR81::FBAp-ILV5+GPMp-kivD, S. cerevisiae ΔPFK1 pRS411::edp3-edp4-edp1 pRS423::CUP1p-alsS+FBAp-ILV3 pHR81::FBAp-ILV5+GPMp-kivD, S. cerevisiae ΔPFK1 pRS411::edp3-edp4-edp2 pRS423::CUP1p-alsS+FBAp-ILV3 pHR81::FBAp-ILV5+GPMp-kivD, S. cerevisiae ΔPFK1 ΔPFK2 ΔFBA1 pRS411::edp3-edp4 pRS423::CUP1p-alsS+FBAp-ILV3 pHR81::FBAp-ILV5+GPMp-kivD, S. cerevisiae ΔPFK1 ΔPFK2 ΔGND1 pRS411::edp3-edp4 pRS423::CUP1p-alsS+FBAp-ILV3 pHR81::FBAp-ILV5+GPMp-kivD, S. cerevisiae ΔPFK1 ΔPFK2 ΔGND2 pRS411::edp3-edp4 pRS423::CUP1p-alsS+FBAp-ILV3 pHR81::FBAp-ILV5+GPMp-kivD, S. cerevisiae ΔPFK1 ΔPFK2 pRS411::edp3-edp4-edp1 pRS423::CUP1p-alsS+FBAp-ILV3 pHR81::FBAp-ILV5+GPMp-kivD, S. cerevisiae ΔPFK1 ΔPFK2 pRS411::edp3-edp4-edp2 pRS423::CUP1p-alsS+FBAp-ILV3 pHR81::FBAp-ILV5+GPMp-kivD, S. cerevisiae ΔPFK1 ΔPFK2 ΔFBA1 ΔGND1 pRS411::edp3-edp4 pRS423::CUP1p-alsS+FBAp-ILV3 pHR81::FBAp-ILV5+GPMp-kivD, S. cerevisiae ΔPFK1 ΔPFK2 ΔFBA1 ΔGND2 pRS411::edp3-edp4 pRS423::CUP1p-alsS+FBAp-ILV3 pHR81::FBAp-ILV5+GPMp-kivD, S. cerevisiae ΔPFK1 ΔPFK2 ΔFBA1 pRS411::edp3-edp4-edp1 pRS423::CUP1 p-alsS+FBAp-ILV3 pHR81::FBAp-ILV5+GPMp-kivD, S. cerevisiae ΔPFK1 ΔPFK2 ΔFBA1 pRS411::edp3-edp4-edp2 pRS423::CUP1 p-alsS+FBAp-ILV3 pHR81::FBAp-ILV5+GPMp-kivD, S. cerevisiae ΔPFK1 ΔPFK2 ΔFBA1 ΔGND1 ΔGND2 pRS411::edp3-edp4 pRS423::CUP1 p-alsS+FBAp-ILV3 pHR81::FBAp-ILV5+GPMp-kivD, S. cerevisiae ΔPFK1 ΔPFK2 ΔFBA1 ΔGND1 pRS411::edp3-edp4-edp1 pRS423::CUP1 p-alsS+FBAp-ILV3 pHR81::FBAp-ILV5+GPMp-kivD, S. cerevisiae ΔPFK1 ΔPFK2 ΔFBA1 ΔGND1 pRS411::edp3-edp4-edp2 pRS423::CUP1 p-alsS+FBAp-ILV3 pHR81::FBAp-ILV5+GPMp-kivD, S. cerevisiae ΔPFK1 ΔPFK2 ΔFBA1 ΔGND1 ΔGND2 pRS411::edp3-edp4-edp1 pRS423::CUP1 p-alsS+FBAp-ILV3 pHR81::FBAp-ILV5+GPMp-kivD, S. cerevisiae ΔPFK1 ΔPFK2 ΔFBA1 ΔGND1 ΔGND2 pRS411::edp3-edp4-edp2 pRS423::CUP1 p-alsS+FBAp-ILV3 pHR81::FBAp-ILV5+GPMp-kivD, S. cerevisiae ΔPFK1 ΔPFK2 ΔFBA1 ΔGND1 ΔGND2 pRS411::edp3-edp4-edp1-edp2 pRS423::CUP1 p-alsS+FBAp-ILV3 pHR81::FBAp-ILV5+GPMp-kivD, S. cerevisiae ΔPGI1 pRS411::edp3-edp4 pRS423::CUP1p-alsS+FBAp-ILV3 pHR81::FBAp-ILV5+GPMp-kivD, S. cerevisiae ΔGND1 pRS411::edp3-edp4 pRS423::CUP1p-alsS+FBAp-ILV3 pHR81::FBAp-ILV5+GPMp-kivD, S. cerevisiae ΔGND2 pRS411::edp3-edp4 pRS423::CUP1p-alsS+FBAp-ILV3 pHR81::FBAp-ILV5+GPMp-kivD, S. cerevisiae pRS411::edp3-edp4-edp1 pRS423::CUP1p-alsS+FBAp-ILV3 pHR81::FBAp-ILV5+GPMp-kivD, S. cerevisiae pRS411::edp3-edp4-edp2 pRS423::CUP1p-alsS+FBAp-ILV3 pHR81::FBAp-ILV5+GPMp-kivD, S. cerevisiae ΔPGI1 ΔGND1 pRS411::edp3-edp4 pRS423::CUP1p-alsS+FBAp-ILV3 pHR81::FBAp-ILV5+GPMp-kivD, S. cerevisiae ΔPGI1 ΔGND2 pRS411::edp3-edp4 pRS423::CUP1p-alsS+FBAp-ILV3 pHR81::FBAp-ILV5+GPMp-kivD, S. cerevisiae ΔPGI1 pRS411::edp3-edp4-edp1 pRS423::CUP1p-alsS+FBAp-ILV3 pHR81::FBAp-ILV5+GPMp-kivD, S. cerevisiae ΔPGI1 pRS411::edp3-edp-4-edp2 pRS423::CUP1p-alsS+FBAp-ILV3 pHR81::FBAp-ILV5+GPMp-kivD, S. cerevisiae ΔPGI1 ΔGND1 ΔGND2 pRS411::edp3-edp4 pRS423::CUP1p-alsS+FBAp-ILV3 pHR81::FBAp-ILV5+GPMp-kivD, S. cerevisiae ΔPGI1 ΔGND1 pRS411::edp3-edp4-edp1 pRS423::CUP1p-alsS+FBAp-ILV3 pHR81::FBAp-ILV5+GPMp-kivD, S. cerevisiae ΔPGI1 ΔGND1 pRS411::edp3-edp4-edp2 pRS423::CUP1p-alsS+FBAp-ILV3 pHR81::FBAp-ILV5+GPMp-kivD, S. cerevisiae ΔPGI1 ΔGND1 ΔGND2 pRS411::edp3-edp4-edp1 pRS423::CUP1p-alsS+FBAp-ILV3 pHR81::FBAp-ILV5+GPMp-kivD, S. cerevisiae ΔPGI1 ΔGND1 ΔGND2 pRS411::edp3-edp4-edp2 pRS423::CUP1p-alsS+FBAp-ILV3 pHR81::FBAp-ILV5+GPMp-kivD, S. cerevisiae ΔPGI1 ΔGND1 ΔGND2 pRS411::edp3-edp4-edp1-edp2 pRS423::CUP1p-alsS+FBAp-ILV3 pHR81::FBAp-ILV5+GPMp-kivD, S. cerevisiae ΔZWF1 pRS411::edp3-edp4-edp1 pRS423::CUP1p-alsS+FBAp-ILV3 pHR81::FBAp-ILV5+GPMp-kivD, S. cerevisiae ΔZWF1 ΔPFK1 pRS411::edp3-edp4-edp1 pRS423::CUP1p-alsS+FBAp-ILV3 pHR81::FBAp-ILV5+GPMp-kivD, S. cerevisiae ΔZWF1 ΔPFK1 ΔPFK2 pRS411::edp3-edp4-edp1 pRS423::CUP1p-alsS+FBAp-ILV3 pHR81::FBAp-ILV5+GPMp-kivD, S. cerevisiae ΔZWF1 ΔPFK1 ΔPFK2 ΔFBA1 pRS411::edp3-edp4-edp1 pRS423::CUP1p-alsS+FBAp-ILV3 pHR81::FBAp-ILV5+GPMp-kivD, S. cerevisiae ΔZWF1 ΔPFK1 ΔPFK2 ΔFBA1 ΔGND1 pRS411::edp3-edp4-edp1 pRS423::CUP1p-alsS+FBAp-ILV3 pHR81::FBAp-ILV5+GPMp-kivD, S. cerevisiae ΔZWF1 ΔPFK1 ΔPFK2 ΔFBA1 ΔGND1 ΔGND2 pRS411::edp3-edp4-edp1 pRS423::CUP1p-alsS+FBAp-ILV3 pHR81::FBAp-ILV5+GPMp-kivD, S. cerevisiae ΔZWF1 ΔPFK1 ΔPFK2 ΔFBA1 ΔGND1 ΔGND2 pRS411::edp3-edp4-edp1-edp2 pRS423::CUP1p-alsS+FBAp-ILV3 pHR81::FBAp-ILV5+GPMp-kivD, S. cerevisiae ΔZWF1 pRS411::edp3-edp4-edp1 pRS423::CUP1p-alsS+FBAp-ILV3 pHR81::FBAp-ILV5+GPMp-kivD, S. cerevisiae ΔZWF1 ΔPGI1 pRS411::edp3-edp4-edp1 pRS423::CUP1p-alsS+FBAp-ILV3 pHR81::FBAp-ILV5+GPMp-kivD, S. cerevisiae ΔZWF1 ΔPGI1 ΔGND1 pRS411::edp3-edp4-edp1 pRS423::CUP1p-alsS+FBAp-ILV3 pHR81::FBAp-ILV5+GPMp-kivD, S. cerevisiae ΔZWF1 ΔPGI1 ΔGND1 ΔGND2 pRS411::edp3-edp4-edp1 pRS423::CUP1p-alsS+FBAp-ILV3 pHR81::FBAp-ILV5+GPMp-kivD, S. cerevisiae ΔZWF1 ΔPGI1 ΔGND1 ΔGND2 pRS411::edp3-edp4-edp1-edp2 pRS423::CUP1p-alsS+FBAp-ILV3 pHR81::FBAp-ILV5+GPMp-kivD.

Construction of a L. plantarum Production Host of the Invention

[0223] Optimization of isobutanol production by a functional EDP in L. plantarum can be achieved through the following: 1) expression and up-regulation of a set of genes that encodes enzymes of an isobutanol production pathway; 2) expressing and up-regulating of a set of genes that encodes preferred EDP enzymes; or 3) decreasing flux through competing carbon-metabolizing pathways in order to achieve e.g. a diminished EMP and/or a diminished oxidative PPP. The Lactobacillus genus belongs to the Lactobacillales family and many plasmids and vectors used in the transformation of Bacillus subtilis and Streptococcus may be used for lactobacillus. L. plantarum belongs to the Lactobacillales family and many plasmids and vectors used in the transformation of Bacillus subtilis and Streptococcus may be used for expression and subsequent up-regulation of a set of genes that encodes enzymes of an isobutanol production pathway. Non-limiting examples of suitable vectors include pAMβ1 and derivatives thereof (Renault et al., Gene, 183:175-182 (1996); and O′Sullivan et al., Gene, 137:227-231 (1993)); pMBB1 and pHW800, a derivative of pMBB1 (Wyckoff et al. Appl. Environ. Microbiol., 62:1481-1486, 1996); pMG1, a conjugative plasmid (Tanimoto et al., J. Bacteriol., 184:5800-5804, 2002); pNZ9520 (Kleerebezem et al., Appl. Environ. Microbiol. 63:4581-4584, 1997); pAM401 (Fujimoto et al., Appl. Environ. Microbiol., 67:1262-1267, 2001); and pAT392 (Arthur et al., Antimicrob. Agents Chemother., 38:1899-1903, 1994). Several plasmids from L. plantarum have also been reported (e.g., van Kranenburg R, Golic N, Bongers R, Leer R J, de Vos W M, Siezen R J, Kleerebezem M. Appl. Environ. Microbiol., 71: 1223-1230, 2005). For example, expression of an isobutanol biosynthetic pathway in L. plantarum is described in Example 21 of U.S. Patent Application Publication No. 20070092957 which is incorporated by reference herein. In one embodiment, expression of isobutanol pathway genes is accomplished by, but not limited to, plasmid pDM1-ilvD-ilvC-kivD-sadB-alsS.

[0224] Due to the fact that L. plantarum does not contain the genes for phophogluconate dehydratase (E.C. 4.2.1.12) and 2-dehydro-3-deoxy-phosphogluconate aldolase (E.C. 4.1.2.14), heterogenous genes that encode phosphogluconate dehydratase reaction (E.C. 4.2.1.12), referred to and afore defined as edp3, and 2-dehydro-3-deoxy-phosphogluconate aldolase reaction (E.C. 4.1.2.14), referred to and afore defined as edp4, need to be expressed in L. plantarum. Additionally, either endogenous genes for glucose-6-phosphate dehydrogenase (E.C. 1.1.1.49) and/or 6-phosphogluconolactonase (E.C. 3.1.1.31) are up-regulated, or heterogenous genes are expressed and/or up-regulated from the set of genes encoding glucose-6-phosphate dehydrogenase (E.C. 1.1.1.49) and 6-phosphogluconolactonase (E.C. 3.1.1.31), referred to and afore defined as edp1 and edp2 and encoding preferred EDP enzymes, respectively, either to augment or replace activity of the endogenous gene products.

[0225] Decreasing flux through competing carbon-metabolizing pathways is achieved through e.g. the disruption or down-regulation of EMP- and PPP-specific genes and their gene products. To diminish oxidative PPP, e.g. the 6-phosphogluconate dehydrogenase activity, in L. plantarum catalyzed by two isoenzymes encoded by the gnd1 (SEQ ID NO: 151) and gnd2 (SEQ ID NO: 153) genes, is reduced or completely eliminated by either down-regulation or deletion of at least one, preferably both of the genes.

[0226] To accomplish a diminished EMP in L. plantarum, the gene pgi (SEQ ID NO: 161), encoding glucose-6-phosphate isomerase (E.C. 5.3.1.9), is down-regulated or deleted. Alternatively, flux through 6-phosphofructokinase (E.C. 2.7.1.11), converting fructose-6-phosphate to fructose-1,6-bisphosphate is reduced or completely eliminated. In L. plantarum, an enzyme that catalyzes the reaction is encoded by the gene pfkA (SEQ ID NO: 175). Diminishing or completely eliminating flux through 6-phosphofructokinase reaction is achieved by deletion or down-regulation of the pfkA gene. Alternatively, the rate of the fructosebisphosphate aldolase reaction (E. C. 4.1.2.13) is diminished or completely eliminated through the down-regulation or deletion of gene fba in L. plantarum (SEQ ID NO: 187). However, reduced or eliminated fructose-bisphosphate aldolase reaction leads to elevated levels of fructose-1,6-bisphosphate in the cells that was found to activate flux through EMP enzymes, but inhibit flux through competing pathways like e.g. oxidative PPP. Consequently, deletion of 6-phosphofructokinase reaction (E.C. 2.7.1.11), converting fructose-6-phosphate to fructose-1,6-bisphosphate, in conjunction with reduction or complete elimination of the fructosebisphosphate aldolase reaction (E. C. 4.1.2.13) at the same time is preferred to optimize isobutanol production through enhancement of the EDP. In L. plantarum, this is achieved by the down-regulation and/or deletion of the gene set comprising pfkA (SEQ ID NO: 175) and fba (SEQ ID NO: 187). Provided herein are methods of decreasing flux through the competing carbon-metabolizing pathways EMP- and PPP is achieved through the disruption or down-regulation of one or more genes of the gene set comprising pgi, pfkA, fba, gnd1 and gnd2.

[0227] Provided herein are genotypes in L. plantarum including the following: L. plantarum pFP996-edp3-edp4 pDM1-ilvD-ilvC-kivD-sadB-alsS, L. plantarum Δpgi pFP996-edp3-edp4 pDM1-ilvD-ilvC-kivD-sadB-alsS, L. plantarum Δgnd1 Δpgi pFP996-edp3-edp4 pDM1-ilvD-ilvC-kivD-sadB-alsS, L. plantarum Δgnd1 Δgnd2 Δpgi pFP996-edp3-edp4 pDM1-ilvD-ilvC-kivD-sadB-alsS, L. plantarum Δgnd1 Δgnd2 Δpgi pFP996-edp3-edp4-edp1 pDM1-ilvD-ilvC-kivD-sadB-alsS, L. plantarum Δgnd1 Δgnd2 Δpgi pFP996-edp3-edp4-edp2 pDM1-ilvD-ilvC-kivD-sadB-alsS, L. plantarum Δgnd1 Δgnd2 Δpgi pFP996-edp3-edp4-edp1-edp2 pDM1-ilvD-ilvC-kivD-sadB-alsS, L. plantarum Δgnd1 pFP996-edp3-edp4 pDM1-ilvD-ilvC-kivD-sadB-alsS, L. plantarum Δgnd2 pFP996-edp3-edp4 pDM1-ilvD-ilvC-kivD-sadB-alsS, L. plantarum ΔpfkA pFP996-edp3-edp4 pDM1-ilvD-ilvC-kivD-sadB-alsS, L. plantarum Δfba pFP996-edp3-edp4 pDM1-ilvD-ilvC-kivD-sadB-alsS, L. plantarum pFP996-edp3-edp4-edp1 pDM1-ilvD-ilvC-kivD-sadB-alsS, L. plantarum pFP996-edp3-edp4-edp2 pDM1-ilvD-ilvC-kivD-sadB-alsS, L. plantarum Δgnd1 Δgnd2 pFP996-edp3-edp4 pDM1-ilvD-ilvC-kivD-sadB-alsS, L. plantarum Δgnd1 ΔpfkA pFP996-edp3-edp4 pDM1-ilvD-ilvC-kivD-sadB-alsS, L. plantarum Δgnd1 Δfba pFP996-edp3-edp4 pDM1-ilvD-ilvC-kivD-sadB-alsS, L. plantarum Δgnd1 pFP996-edp3-edp4-edp1 pDM1-ilvD-ilvC-kivD-sadB-alsS, L. plantarum Δgnd1 pFP996-edp3-edp4-edp2 pDM1-ilvD-ilvC-kivD-sadB-alsS, L. plantarum Δgnd1 Δgnd2 ΔpfkA pFP996-edp3-edp4 pDM1-ilvD-ilvC-kivD-sadB-alsS, L. plantarum Δgnd1 Δgnd2 Δfba pFP996-edp3-edp4 pDM1-ilvD-ilvC-kivD-sadB-alsS, L. plantarum Δgnd1 Δgnd2 pFP996-edp3-edp4-edp1 pDM1-ilvD-ilvC-kivD-sadB-alsS, L. plantarum Δgnd1 Δgnd2 pFP996-edp3-edp4-edp2 pDM1-ilvD-ilvC-kivD-sadB-alsS, L. plantarum Δgnd1 Δgnd2 ΔpfkA Δfba pFP996-edp3-edp4 pDM1-ilvD-ilvC-kivD-sadB-alsS, L. plantarum Δgnd1 Δgnd2 ΔpfkA pFP996-edp3-edp4-edp1 pDM1-ilvD-ilvC-kivD-sadB-alsS, L. plantarum Δgnd1 Δgnd2 ΔpfkA pFP996-edp3-edp-4-edp2 pDM1-ilvD-ilvC-kivD-sadB-alsS, L. plantarum Δgnd1 Δgnd2 ΔpfkA Δfba pFP996-edp3-edp4-edp1 pDM1-ilvD-ilvC-kivD-sadB-alsS, L. plantarum Δgnd1 Δgnd2 ΔpfkA Δfba pFP996-edp3-edp-4-edp2 pDM1-ilvD-ilvC-kivD-sadB-alsS, L. plantarum Δgnd1 Δgnd2 ΔpfkA Δfba pFP996-edp3-edp4-edp1-edp2 pDM1-ilvD-ilvC-kivD-sadB-alsS, L. plantarum Δgpd Δgnd1 Δgnd2 Δpgi pFP996-edp3-edp4-edp1 pDM1-ilvD-ilvC-kivD-sadB-alsS, L. plantarum Δgpd Δgnd1 Δgnd2 Δpgi pFP996-edp3-edp4-edp1-edp2 pDM1-ilvD-ilvC-kivD-sadB-alsS, L. plantarum Δgpd pFP996-edp3-edp4-edp1 pDM1-ilvD-ilvC-kivD-sadB-alsS, L. plantarum Δgpd Δgnd1 pFP996-edp3-edp4-edp1 pDM1-ilvD-ilvC-kivD-sadB-alsS, L. plantarum Δgpd Δgnd1 Δgnd2 pFP996-edp3-edp4-edp1 pDM1-ilvD-ilvC-kivD-sadB-alsS, L. plantarum Δgpd Δgnd1 Δgnd2 ΔpfkA pFP996-edp3-edp4-edp1 pDM1-ilvD-ilvC-kivD-sadB-alsS, L. plantarum Δgpd Δgnd1 Δgnd2 ΔpfkA Δfba pFP996-edp3-edp4-edp1 pDM1-ilvD-ilvC-kivD-sadB-alsS, L. plantarum Δgpd Δgnd1 Δgnd2 ΔpfkA Δfba pFP996-edp3-edp4-edp1-edp2 pDM1-ilvD-ilvC-kivD-sadB-alsS.

### Carbohydrate Metabolism and Carbon Substrates

[0228] Glucose- or fructose-derivatives, like e.g. glucose-1-phosphate, glucose-6-phosphate, fructose-1-phosphate or fructose-6-phosphate, are central and typically interconvertable metabolites in most of the common carbohydrate-metabolizing pathways and their substrates, including, but not limited to, monosaccharides such as glucose and fructose, oligosaccharides such as lactose or sucrose, polysaccharides/glucans such as starch or cellulose or mixtures thereof and unpurified mixtures from renewable feedstocks such as cheese whey permeate, cornsteep liquor, sugar beet molasses, and barley malt.

[0229] Recombinant bacteria or yeast hosts disclosed herein are contacted with fermentation media which contains suitable carbon substrates for isobutanol production. Suitable carbon substrates may include but are not limited to monosaccharides such as glucose and fructose, oligosaccharides such as lactose, maltose, galactose, or sucrose, polysaccharides/glucans such as starch or cellulose or mixtures thereof and unpurified mixtures from renewable feedstocks such as cheese whey permeate, cornsteep liquor, sugar beet molasses, and barley malt. Other carbon substrates may include ethanol, lactate, succinate, or glycerol.

[0230] Methylotrophic organisms are also known to utilize a number of other carbon containing compounds such as methylamine, glucosamine and a variety of amino acids for metabolic activity. For example, methylotrophic yeasts are known to utilize the carbon from methylamine to form trehalose or glycerol (Bellion et al., Microb. Growth C1 Compd., [Int. Symp.], 7th (1993), 415-32, Editor(s): Murrell, J. Collin; Kelly, Don P. Publisher: Intercept, Andover, UK). Similarly, various species of Candida will metabolize alanine or oleic acid (Sulter et al., Arch. Microbiol. 153:485-489 (1990)). Hence it is contemplated that the source of carbon utilized in the present invention may encompass a wide variety of carbon containing substrates and will only be limited by the choice of organism.

[0231] Although it is contemplated that all of the mentioned carbon substrates and mixtures thereof are suitable in the present invention, preferred carbon substrates are glucose, fructose, and sucrose, or mixtures of these with C5 sugars such as xylose and/or arabinose for yeasts cells modified to use C5 sugars. Sucrose may be derived from renewable sugar sources such as sugar cane, sugar beets, cassava, sweet sorghum, and mixtures thereof. Glucose and dextrose may be derived from renewable grain sources through saccharification of starch based feedstocks including grains such as corn, wheat, rye, barley, oats, and mixtures thereof. In addition, fermentable sugars may be derived from renewable cellulosic or lignocellulosic biomass (including hemicellulose) through processes of pretreatment and saccharification, as described, for example, in U.S. Patent Application Publication No. 20070031918A1, which is herein incorporated by reference. Biomass may include both five carbon (e.g., xylose, arabinose) and six carbon sugars. Biomass refers to any cellulosic or lignocellulosic material and includes materials comprising cellulose, and optionally further comprising hemicellulose, lignin, starch, oligosaccharides and/or monosaccharides. Biomass may also comprise additional components, such as protein and/or lipid. Biomass may be derived from a single source, or biomass can comprise a mixture derived from more than one source; for example, biomass may comprise a mixture of corn cobs and corn stover, or a mixture of grass and leaves. Biomass includes, but is not limited to, bioenergy crops, agricultural residues, municipal solid waste, industrial solid waste, sludge from paper manufacture, yard waste, wood and forestry waste. Examples of biomass include, but are not limited to, corn grain, corn cobs, crop residues such as corn husks, corn stover, grasses, wheat, wheat straw, barley, barley straw, hay, rice straw, switchgrass, waste paper, sugar cane bagasse, sorghum, soy, components obtained from milling of grains, trees, branches, roots, leaves, wood chips, sawdust, shrubs and bushes, vegetables, fruits, flowers, animal manure, and mixtures thereof.

[0232] In addition to an appropriate carbon source, fermentation media must contain suitable minerals, salts, cofactors, buffers and other components, known to those skilled in the art, suitable for the growth of the cultures and promotion of the enzymatic pathway necessary for isobutanol production.

### Determination of Flux

[0233] While not wishing to be bound by theory, it is believed that modification of the EDP, PPP, or EMP of a host cell as provided herein will provide increased flux through the EDP, and consequently will provide optimized production and utilization of reducing equivalents for isobutanol production. Enhanced EDP can be confirmed using ¹³C tracer analysis methodology known in the art and exemplified herein (see prophetic Example 17). In preferred embodiments, the microbial host cell comprises an enhanced EDP and an increased relative flux through the EDP under anaerobic conditions. In preferred embodiments, the relative flux through at least one reaction unique to the EDP under anaerobic conditions is at least 1% greater than that in the control host, demonstrating that isobutanol is produced with the help of a functional and/or enhanced ED pathway. In other preferred embodiments, the relative flux through at least one reaction unique to the EDP is at least about 10%, 50%, or 90% greater than that in the control host. In other embodiments, the relative flux through a reaction unique to the EMP or PPP is at least 1% less than that in the control host, demonstrating that isobutanol is produced with the help of a functional and/or enhanced EDP pathway. In preferred embodiments, microbial host cells comprise an increase in relative flux through the EDP with a concomitant decrease in the EMP and PPP.

### Aerobic and Anaerobic Conditions

[0234] While it is contemplated that microbial host cells provided herein are suitable for isobutanol production under aerobic conditions, it is believed that microbial host cells provided herein which produce isobutanol are particularly suitable for isobutanol production under anaerobic conditions because the production and subsequent utilization of reducing equivalents is optimized. Therefore, particularly preferred embodiments include microbial host cells comprising an enhanced EDP and/or a diminished EMP and/or PPP and which produce isobutanol under anaerobic conditions. Provided herein are methods of producing isobutanol comprising providing a microbial host cell disclosed herein and contacting the host cell with a fermentable carbon substrate under anaerobic conditions.

### Cofactor Preference

[0235] Although the descriptions of isobutanol pathways provided herein assume particular cofactor production and utilization specificities, it is also understood that useful enzymes with different preferences may be identified, engineered, and employed. For example, a KARI enzyme which utilizes NADH has been described in U.S. Patent Application Publication No. US20090163376, and may be employed in an isobutanol production pathway. It is contemplated herein that the EDP, EMP, and/or PPP can likewise be modified such that the cofactor specificity is coordinated. Thus, in one embodiment, provided herein are recombinant microbial host cells which produce isobutanol and comprise an alteration in the EDP, EMP, or PPP such that the reducing equivalents produced during the conversion of glucose to pyruvate are matched with the cofactors required for the conversion of pyruvate to isobutanol. In another embodiment, provided herein are methods of isobutanol production comprising altering the EDP, EMP, or PPP of a microbial host cell such that the reducing equivalents produced during the conversion of glucose to pyruvate are matched with the cofactors required for the conversion of pyruvate to isobutanol.

### Culture Conditions

[0236] Typically cells are grown at a temperature in the range of about 25° C. to about 40° C. in an appropriate medium. Suitable growth media in the present invention are common commercially prepared media such as Luria Bertani (LB) broth. Other defined or synthetic growth media may also be used, and the appropriate medium for growth of the particular microorganism will be known by one skilled in the art of microbiology or fermentation science. The use of agents known to modulate catabolite repression directly or indirectly, e.g., cyclic adenosine 2′:3′-monophosphate, may also be incorporated into the fermentation medium.

[0237] Suitable pH ranges for the fermentation of yeast are typically between pH 3.0 to pH 9.0, where pH 5.0 to pH 8.0 is preferred as the initial condition. Suitable pH ranges for the fermentation of other microorganisms are between pH 3.0 to pH7.5, where pH 4.5.0 to pH 6.5 is preferred as the initial condition.

[0238] Production of isobutanol may be performed under aerobic or anaerobic conditions, where anaerobic or microaerobic conditions are preferred.

[0239] The amount of isobutanol produced in the fermentation medium can be determined using a number of methods known in the art, for example, high performance liquid chromatography (HPLC) or gas chromatography (GC).

### Batch and Continuous Fermentations

[0240] A batch method of fermentation may be used. A classical batch fermentation is a closed system where the composition of the medium is set at the beginning of the fermentation and not subject to artificial alterations during the fermentation. Thus, at the beginning of the fermentation the medium is inoculated with the desired organism or organisms, and fermentation is permitted to occur without adding anything to the system. Typically, however, a “batch” fermentation is batch with respect to the addition of carbon source and attempts are often made at controlling factors such as pH and oxygen concentration. In batch systems the metabolite and biomass compositions of the system change constantly up to the time the fermentation is stopped. Within batch cultures cells moderate through a static lag phase to an exponential phase and finally to a stationary phase where growth rate is diminished or halted. If untreated, cells in the stationary phase will eventually die. Cells in log phase generally are responsible for the bulk of production of end product or intermediate.

[0241] A variation on the standard batch system is the fed-batch system. Fed-batch fermentation processes are also suitable in the present invention and comprise a typical batch system with the exception that the substrate is added in increments as the fermentation progresses. Fed-batch systems are useful when catabolite repression is apt to inhibit the metabolism of the cells and where it is desirable to have limited amounts of substrate in the media. Measurement of the actual substrate concentration in fed-batch systems is difficult and is therefore estimated on the basis of the changes of measurable factors such as pH, dissolved oxygen and the partial pressure of waste gases such as CO₂. Batch and Fed-Batch fermentations are common and well known in the art and examples may be found in Thomas D. Brock in (Biotechnology: A Textbook of Industrial Microbiology, Second Edition, 1989, Sinauer Associates, Inc., Sunderland, Mass.), or in Deshpande, Mukund V., (Appl. Biochem. Biotechnol., 36:227, 1992), herein incorporated by reference.

[0242] Although the present invention is performed in batch mode it is contemplated that the method would be adaptable to continuous fermentation methods. Continuous fermentation is an open system where a defined fermentation medium is added continuously to a bioreactor and an equal amount of conditioned media is removed simultaneously for processing. Continuous fermentation generally maintains the cultures at a constant high density where cells are primarily in log phase growth.

[0243] Continuous fermentation allows for the modulation of one factor or any number of factors that affect cell growth or end product concentration. For example, one method will maintain a limiting nutrient such as the carbon source or nitrogen level at a fixed rate and allow all other parameters to moderate. In other systems a number of factors affecting growth can be altered continuously while the cell concentration, measured by media turbidity, is kept constant. Continuous systems strive to maintain steady state growth conditions and thus the cell loss due to the medium being drawn off must be balanced against the cell growth rate in the fermentation. Methods of modulating nutrients and growth factors for continuous fermentation processes as well as techniques for maximizing the rate of product formation are well known in the art of industrial microbiology and a variety of methods are detailed by Brock, supra.

[0244] It is contemplated that the present invention may be practiced using either batch, fed-batch or continuous processes and that any known mode of fermentation would be suitable. Additionally, it is contemplated that cells may be immobilized on a substrate as whole cell catalysts and subjected to fermentation conditions for isobutanol production.

Methods for Isobutanol Isolation from the Fermentation Medium

[0245] The bioproduced isobutanol may be isolated from the fermentation medium using methods known in the art. For example, solids may be removed from the fermentation medium by centrifugation, filtration, decantation, or the like. Then, the isobutanol may be isolated from the fermentation medium, which has been treated to remove solids as described above, using methods such as distillation, liquid-liquid extraction, or membrane-based separation. Because isobutanol forms a low boiling point, azeotropic mixture with water, distillation can only be used to separate the mixture up to its azeotropic composition. Distillation may be used in combination with another separation method to obtain separation around the azeotrope. Methods that may be used in combination with distillation to isolate and purify isobutanol include, but are not limited to, decantation, liquid-liquid extraction, adsorption, and membrane-based techniques. Additionally, isobutanol may be isolated using azeotropic distillation using an entrainer (see for example Doherty and Malone, Conceptual Design of Distillation Systems, McGraw Hill, N.Y., 2001).

[0246] The isobutanol-water mixture forms a heterogeneous azeotrope so that distillation may be used in combination with decantation to isolate and purify the isobutanol. In this method, the isobutanol containing fermentation broth is distilled to near the azeotropic composition. Then, the azeotropic mixture is condensed, and the isobutanol is separated from the fermentation medium by decantation. The decanted aqueous phase may be returned to the first distillation column as reflux. The isobutanol-rich decanted organic phase may be further purified by distillation in a second distillation column.

[0247] The isobutanol may also be isolated from the fermentation medium using liquid-liquid extraction in combination with distillation. In this method, the isobutanol is extracted from the fermentation broth using liquid-liquid extraction with a suitable solvent. The isobutanol-containing organic phase is then distilled to separate the isobutanol from the solvent.

[0248] Distillation in combination with adsorption may also be used to isolate isobutanol from the fermentation medium. In this method, the fermentation broth containing the isobutanol is distilled to near the azeotropic composition and then the remaining water is removed by use of an adsorbent, such as molecular sieves (Aden et al., Lignocellulosic Biomass to Ethanol Process Design and Economics Utilizing Co-Current Dilute Acid Prehydrolysis and Enzymatic Hydrolysis for Corn Stover, Report NREL/TP-510-32438, National Renewable Energy Laboratory, June 2002).

[0249] Additionally, distillation in combination with pervaporation may be used to isolate and purify the isobutanol from the fermentation medium. In this method, the fermentation broth containing the isobutanol is distilled to near the azeotropic composition, and then the remaining water is removed by pervaporation through a hydrophilic membrane (Guo et al., J. Membr. Sci. 245: 199-210, 2004).

### EXAMPLES

[0250] The present invention is further defined in the following Examples. It should be understood that these Examples, while indicating preferred embodiments of the invention, are given by way of illustration only. From the above discussion and these Examples, one skilled in the art can ascertain the essential characteristics of this invention, and without departing from the spirit and scope thereof, can make various changes and modifications of the invention to adapt it to various uses and conditions.

[0251] The meaning of abbreviations used is as follows: “min” means minute(s), “hr” means hour(s), “μL” means microliter(s), “mL” means milliliter(s), “L” means liter(s), “nm” means nanometer(s), “mm” means millimeter(s), “cm” means centimeter(s), “μm” means micrometer(s), “mM” means millimolar, “M” means molar, “mmol” means millimole(s), “pmole” means micromole(s), “g” means gram(s), “μg” means microgram(s), “mg” means milligram(s), “g” means the gravitation constant, “rpm” means revolutions per minute, “U/mg protein” means unit per milligram of protein, “μg/mL” means microgram per milliliter, “kb” means kilobase, “id” means internal diameter, “° C./min” means degress Celsius per minute, “mL/min” means milliliter per minute, “Ω” means ohm, “sec” means second(s), “min” means minute(s), “μF” means micro Faraday.

### General Methods:

[0252] Standard recombinant DNA and molecular cloning techniques used in the Examples are well known in the art and are described by Sambrook, J., Fritsch, E. F. and Maniatis, T., Molecular Cloning: A Laboratory Manual, Cold Spring Harbor Laboratory Press, Cold Spring Harbor, N.Y., 1989, by T. J. Silhavy, M. L. Bennan, and L. W. Enquist, Experiments with Gene Fusions, Cold Spring Harbor Laboratory, Cold Spring Harbor, N.Y., 1984, and by Ausubel, F. M. et al., Current Protocols in Molecular Biology, Greene Publishing Assoc. and Wiley-Interscience, N.Y., 1987.

[0253] Materials and methods suitable for the maintenance and growth of bacterial cultures are also well known in the art. Techniques suitable for use in the following Examples may be found, for example, in Manual of Methods for General Bacteriology, Phillipp Gerhardt, R. G. E. Murray, Ralph N. Costilow, Eugene W. Nester, Willis A. Wood, Noel R. Krieg and G. Briggs Phillips, eds., American Society for Microbiology, Washington, D.C., 1994, or by Thomas D. Brock in Biotechnology: A Textbook of Industrial Microbiology, Second Edition, Sinauer Associates, Inc., Sunderland, Mass., 1989. All reagents, and materials used for the growth and maintenance of bacterial cells were obtained from Aldrich Chemicals (Milwaukee, Wis.), BD Diagnostic Systems (Sparks, Md.), Life Technologies (Rockville, Md.), or Sigma Chemical Company (St. Louis, Mo.), unless otherwise specified.

[0254] Microbial strains were obtained from The American Type Culture Collection (ATCC), Manassas, Va., unless otherwise noted.

[0255] Gene deletions in E. coli can be carried out by standard molecular biology techniques appreciated by one skilled in the art. For example, to create an E. coli strain deleted in a particular gene activity, the gene is deleted by replacing it with an antibiotic resistance marker using the Lambda Red-mediated homologous recombination system as described by Datsenko and Wanner (Proc. Natl. Acad. Sci. USA, 97: 6640-6645, 2000). The Keio collection of E. coli strains (Baba et al., Mol. Syst. Biol., 2:1-11, 2006) is a library of single gene knockouts created in strain E. coli BW25113 by the method of Datsenko and Wanner (supra). In the collection, each deleted gene was replaced with a FRT-flanked kanamycin marker that was removable by Flp recombinase. Alternatively an antibiotic marker may be flanked by other site-specific recombination sequences such as loxP removable by the bacteriophage P1 Cre recombinase (Hoess, R. H. & Abremski, K., J Mol. Biol., 181:351-362, 1985).

### P1 Transduction

[0256] P1vir transductions were carried out as described by Miller with some modifications (Miller, J. H. 1992. A Short Course in Bacterial Genetics. Cold Spring Harbor Laboratory, Cold Spring Harbor, N.Y.). Briefly, to prepare a transducing lysate, cells of the donor strain were grown overnight in the Luria Broth (LB) medium at 37 C while shaking. An overnight growth of these cells was sub-cultured into the LB medium containing 0.005M CaCl₂ and placed in a 37 C water bath with no aeration. One hour prior to adding phage, the cells were placed at 37 C with shaking. After final growth of the cells, a 1.0 mL aliquot of the culture was dispensed into 14-ml Falcon tubes and approximately 10e7 P1vir phage/mL was added. These tubes were incubated in a 37 C water bath for 20 min before 2.5 mL of 0.8% LB top agar was added to each tube, the contents were spread on an LB agar plate and were incubated at 37 C. The following day the soft agar layer was scraped into a centrifuge tube. The surface of the plate was washed with the LB medium and added to the centrifuge tube followed by a few drops of CHCl₃ before the tube was vigorously agitated using a Vortex mixer. After centrifugation at 4,000 rpm for 10 min, the supernatant containing the P1vir lysate was collected.

[0257] For transduction, the recipient strain was grown overnight in 1-2 mL of the LB medium at 37 C with shaking. Cultures were pelleted by centrifugation in an Eppendorf Microcentrifuge at 10,000 rpm for 1 min at room temp. The cell pellet was resuspended in an equal volume of MC buffer (0.1 M MgSO4, 0.005 M CaCl₂), dispensed into tubes in 0.1 mL aliquots and 0.1 ml and 0.01 ml of P1vir lysate was added. A control tube containing no P1vir lysate was also included. Tubes were incubated for 20 min at 37 C before 0.2 mL of 0.1 M sodium citrate was added to stop the P1 infection. One mL of the LB medium was added to each tube before they were incubated at 37 C for 1 hr. After incubation the cells were pelleted as described above, resuspended in 50-200 μl of the LB prior to spreading on the LB plates containing 25 μg/mL kanamycin and were incubated overnight at 37 C Transductants were screened by colony PCR with chromosome specific primers flanking the region upstream and downstream of the kanamycin marker insertion.

### Marker Removal

[0258] Removal of the FRT-flanked kanamycin marker from the chromosome was obtained by transforming the kanamycin-resistant strain with plasmid pCP20 (Cherepanov, P. P. and Wackernagel, W., Gene, 158: 9-14, 1995; available from The Coli Genetic Stock Center at Yale, Cat. No. 7629) followed by spreading onto the LB ampicillin (100 μg/mL) plates and incubating at 30 C. The pCP20 plasmid carries the yeast FLP recombinase under the control of the γ PR promoter. Expression from this promoter is controlled by the cl857 temperature-sensitive repressor residing on the plasmid. The origin of replication of pCP20 is also temperature-sensitive. Ampicillin resistant colonies were streaked onto the LB agar plates and incubated at 42 C. The higher incubation temperature simultaneously induced expression of the FLP recombinase and cured the pCP20 plasmid from the cell. Isolated colonies were patched to grids onto the LB plates containing kanamycin (25 μg/mL), and LB ampicillin (100 μg/mL) plates and LB plates. The resulting kanamycin-sensitive, ampicillin-sensitive colonies were screened by colony PCR to confirm removal of the kanamycin marker from the chromosome.

[0259] Removal of the loxP-flanked kanamycin marker from the chromosome was performed by transforming the kanamycin-resistant strain with pJW168 an ampicillin-resistant plasmid (Wild et al., Gene. 223:55-66, 1998) harboring the bacteriophage P1 Cre recombinase. Cre recombinase (Hoess, R. H. & Abremski, K., supra) meditates excision of the kanamycin resistance gene via recombination at the loxP sites. Transformants are spread on LB ampicillin (100 μg/mL) plates and incubated at 30 C. Ampicillin resistant colonies were streaked onto the LB agar plates and incubated at 42 C. The higher incubation temperature cured the temperature-sensitive pJW168 plasmid from the cell. Isolated colonies were patched to grids onto the LB plates containing kanamycin (25 μg/mL), and LB ampicillin (100 μg/mL) plates and LB plates. The resulting kanamycin-sensitive, ampicillin-sensitive colonies were screened by colony PCR to confirm removal of the kanamycin marker from the chromosome.

[0260] For colony PCR amplifications the HotStarTaq Master Mix (Qiagen, Valencia, Calif.; catalog no. 71805-3) was used according to the manufacturer's protocol. Into a 25 μL Master Mix reaction containing 0.2 μM of each chromosome specific PCR primer, a small amount of a colony was added. Amplification was carried out in a DNA Thermocycler GeneAmp 9700 (PE Applied Biosystems, Foster City, Calif.). Typical colony PCR conditions were: 15 min at 95° C.; 30 cycles of 95° C. for 30 sec, annealing temperature ranging from 50-58° C. for 30 sec, primers extended at 72° C. with an extension time of approximately 1 min/kb of DNA; then 10 min at 72° C. followed by a hold at 4oC. PCR product sizes were determined by gel electrophoresis by comparison with known molecular weight standards.

[0261] Restriction enzymes, T4 DNA ligase and Phusion High Fidelity DNA Polymerase (New England Biolabs, Beverely, Mass.) were used according to manufacturer's recommendation.

[0262] Plasmid DNA was prepared using the QIAprep Spin Miniprep kit (Qiagen, Valencia, Calif.; catalog no. 27106) according to manufacturer's recommendations. DNA fragments were extracted from gels using the Zymoclean Gel Extraction Kit (Zymo Research Corp. Orange, Calif.) Gel electrophoresis used the RunOne electrophoresis system (Embi Tec, San Diego, Calif.) with precast Reliant® 1% agarose gels (Lonza Rockland, Inc. Rockland, Me.) according to manufacturer's protocols. Gels are typically run in TBE buffer (Invitrogen, Cat. No. 15581-044).

[0263] For transformations, electrocompetent cells of E. coli were prepared as described by Ausubel, F. M., et al., (Current Protocols in Molecular Biology, 1987, Wiley-Interscience,). Cells were grown in 25-50 ml the LB medium at 30-37° C. and harvested at anOD600 of 0.5-0.7 by centrifugation at 10,000 rpm for 10 minutes. These cells are washed twice in sterile ice-cold water in a volume equal to the original starting volume of the culture. After the final wash cells were resuspended in sterile water and the DNA to be transformed was added. The cells and DNA were transferred to chilled cuvettes and electroporated in a Bio-Rad Gene Pulser II according to manufacturer's instructions (Bio-Rad Laboratories, Inc Hercules, Calif.).

[0264] The oligonucleotide primers to use in the following Examples are given in Table 5. All the oligonucleotide primers were synthesized by Integrated DNA Technologies, Inc. (Coralville, Iowa).

### Methods for Determining Isobutanol Concentration in the Culture Medium

[0265] The concentration of isobutanol in the medium can be determined by a number of methods known in the art. For example, a specific high performance liquid chromatography (HPLC) method using a Shodex SH-1011 column with a Shodex SH-G guard column, (Waters Corporation, Milford, Mass.), with refractive index (RI) detection may be used. Chromatographic separation can be achieved using 0.01 M H₂SO₄ as the mobile phase with a flow rate of 0.5 mL/min and a column temperature of 50° C. Isobutanol has a retention time of 46.6 min under these conditions. Alternatively, gas chromatography (GC) methods are available. For example, isobutanol can be detected using an HP-INNOWax GC column (30 m×0.53 mm id, 1 μm film thickness, Agilent Technologies, Wilmington, Del.), with a flame ionization detector (FID) using the following method: The carrier gas helium at a flow rate of 4.5 mL/min, at 150° C. with constant head pressure; injector split of 1:25 at 200° C.; oven temperature of 45° C. for 1 min, 45 to 220° C. at 10° C./min, and 220° C. for 5 min; and FID detection at 240° C. with 26 mL/min helium makeup gas. The retention time of isobutanol under these conditions is 4.5 min.

### Examples

### Example 1

### Prophetic

### Deletion of 6-phosphogluconate Dehydrogenase Genes in E. coli

[0266] Gene deletions in E. coli can be carried out by standard molecular biology techniques appreciated by one skilled in the art. To create an E. coli strain Δgnd in E. coli K12 MG1655, the gene is deleted by replacing it with a kanamycin resistance marker using the Lambda Red-mediated homologous recombination system as described by Datsenko and Wanner (Proc. Natl. Acad. Sci. USA, 97: 6640-6645, 2000). PCR amplification with pKD13 (Datsenko and Wanner, supra) as template and primers GND H1 (SEQ ID NO: 227) and GND H2 (SEQ ID NO: 228) produces a 1.4 kb product. Primer GND H1 consists of the first 50 by of the CDS of gnd followed by 20 nucleotides homologous to the P1 site of pKD13. The GND H2 primer consists of the last 50 base pairs of the gnd CDS followed by 20 bps homologous to the P2 sequence of pKD13. PCR amplification uses the HotStarTaq Master Mix (Qiagen, Valencia, Calif.; catalog no. 71805-3) according to the manufacturer's protocol. Amplification is carried out in a DNA Thermocycler GeneAmp 9700 (PE Applied Biosystems, Foster City, Calif.). The PCR product is gel-purified from a 1% agarose gel with a Qiaquick Gel Extraction Kit (Qiagen Inc., Valencia, Calif.).

[0267] E. coli MG1655 harboring pKD46, the temperature sensitive Red recombinase plasmid (Datsenko and Wanner, supra), is grown in 50 mL LB medium with 100 μg/mL ampicillin and 20 mM L-arabinose at 30° C. to an OD600 of 0.5-0.7. Electrocompetent cells of E. coli MG1655/pKD46 are then prepared as described by Ausubel, F. M., et al., (Current Protocols in Molecular Biology, 1987, Wiley-Interscience,). E. coli MG1655/pKD46 is electrotransformed with up to 1 μg of the 1.4 kb PCR product in a Bio-Rad Gene Pulser II according to manufacturer's instructions (Bio-Rad Laboratories Inc, Hercules, Calif.). After electroporation cells are outgrown in SOC medium (2% Bacto Tryptone (Difco), 0.5% yeast extract (Difco), 10 mM NaCl, 2.5 mM KCL, 10 mM MgCl₂, 10 mM MgSO₄, 20 mM glucose) for 2 hours at 30° C. with shaking. Transformants are spread onto LB plates containing kanamycin (25 μg/mL) and incubated overnight at 37° C. to cure the temperature sensitive recombinase plasmid.

[0268] Transformants are patched to grids onto LB plates containing kanamycin (25 μg/mL), and LB ampicillin (100 μg/mL) to test for loss of the ampicillin resistant recombinase plasmid, pKD46. Ampillicin-sensitive kanamycin resistant transformants are further analyzed by colony PCR using primers GND Ck UP (SEQ ID NO: 229) and GND Ck Dn (SEQ ID NO: 230), for the expected 1.6 kb PCR fragment. For colony PCR amplifications the HotStarTaq Master Mix (Qiagen, Valencia, Calif.; catalog no. 71805-3) is used according to the manufacturer's protocol. Amplification is carried out in a DNA Thermocycler GeneAmp 9700 (PE Applied Biosystems, Foster City, Calif.). PCR product sizes are determined by gel electrophoresis by comparison with known molecular weight standards. This way strain E. coli K12 MG1655 Δgnd is obtained and validated to be E. coli K12 MG1655 Δgnd.

### Example 2

### Prophetic

### Expression of Isobutanol Production Pathway in E. coli

[0269] Expression of heterologous genes encoding an isobutanol production pathway in an E. coli gene deletion strain can be carried out by standard molecular biology techniques that can be appreciated by one skilled in the art. A DNA fragment encoding a butanol dehydrogenase (DNA SEQ ID NO:103; protein SEQ ID NO: 104) from Achromobacter xylosoxidans is amplified from A. xylosoxidans genomic DNA using standard conditions. The DNA is prepared using a Gentra Puregene kit (Gentra Systems, Inc., Minneapolis, Minn.; catalog number D-5500A) following the recommended protocol for gram negative organisms. PCR amplification is done using forward and reverse primers N473 and N469 (SEQ ID NOs: 231 and 232), respectively with Phusion high Fidelity DNA Polymerase (New England Biolabs, Beverly, Mass.). The PCR product is TOPO-Blunt cloned into pCR4 BLUNT (Invitrogen) to produce pCR4Blunt::sadB, which is transformed into E. coli Mach-1 cells. Plasmid is subsequently isolated from an obtained clone, and the sequence verified. The sadB coding region is then cloned into the vector pTrc99a (Amann et al., Gene 69: 301-315, 1988). The pCR4Blunt::sadB is digested with EcoRI, releasing the sadB fragment, which is ligated with EcoRI-digested pTrc99a to generate pTrc99a::sadB. This plasmid is transformed into E. coli Mach 1 cells and the resulting transformant is named Mach1/pTrc99a::sadB. The sadB gene is then subcloned into pTrc99A::budB-ilvC-ilvD-kivD as described below. The pTrc99A::budB-ilvC-ilvD-kivD is the pTrc-99a expression vector carrying an operon for isobutanol expression (described in Examples 9-14 of the U.S. Patent Application Publication No. 20070092957, which are incorporated herein by reference). The first gene in the pTrc99A::budB-ilvC-ilvD-kivD isobutanol operon is budB encoding acetolactate synthase from Klebsiella pneumoniae ATCC 25955, followed by the ilvC gene encoding acetohydroxy acid reductoisomerase from E. coli. This is followed by ilvD encoding acetohydroxy acid dehydratase from E. coli and lastly the kivD gene encoding the branched-chain keto acid decarboxylase from L. lactis. The sadB coding region is amplified from pTrc99a::sadB using primers N695A (SEQ ID NO: 233) and N696A (SEQ ID NO: 234) with Phusion High Fidelity DNA Polymerase (New England Biolabs, Beverly, Mass.). Amplification is carried out with an initial denaturation at 98° C. for 1 min, followed by 30 cycles of denaturation at 98° C. for 10 sec, annealing at 62° C. for 30 sec, elongation at 72° C. for 20 sec and a final elongation cycle at 72° C. for 5 min, followed by a 4° C. hold. Primer N695A containes an AvrII restriction site for cloning and a RBS upstream of the ATG start codon of the sadB coding region. The N696A primer includes an XbaI site for cloning. The 1.1 kb PCR product is digested with AvrII and XbaI (New England Biolabs, Beverly, Mass.) and gel purified using a Qiaquick Gel Extraction Kit (Qiagen Inc., Valencia, Calif.)). The purified fragment is ligated with pTrc99A::budB-ilvC-ilvD-kivD, that has been cut with the same restriction enzymes, using T4 DNA ligase (New England Biolabs, Beverly, Mass.). The ligation mixture is incubated at 16° C. overnight and then transformed into E. coli Mach 1™ competent cells (Invitrogen) according to the manufacturer's protocol. Transformants are obtained following growth on the LB agar plates with 100 μg/mL ampicillin. Plasmid DNA from the transformants is prepared with QIAprep Spin Miniprep Kit (Qiagen Inc., Valencia, Calif.) according to manufacturer's protocols. The resulting plasmid is called pTrc99A::budB-ilvC-ilvD-kivD-sadB. Electrocompetent E. coli K12 MG1655 Δgnd cells are prepared as described and transformed with pTrc99A::budB-ilvC-ilvD-kivD-sadB. Transformants are streaked onto LB agar plates containing 100 μg/mL ampicillin. The resulting strain is E. coli K12 MG1655 Δgnd carrying plasmid pTrc99A::budB-ilvC-ilvD-kivD-sadB, and is designated E. coli K12 MG1655 Δgnd iso⁺.

### Example 3

### Prophetic

### Expression of gsda from A. niger in E. coli K12 MG1655 Δgnd iso⁺

[0270] Expression from of a set of heterologous genes on a second plasmid in addition to genes encoding an isobutanol production pathway in an E. coli or E. coli gene deletion strain can be carried out by standard molecular biology techniques known in the art. As an example it is described how to clone and express in E. coli K12 MG1655 Δgnd pTrc99A::budB-ilvC-ilvD-kivD-sadB the gsdA gene that encodes a glucose-6-phosphate dehydrogenase enzyme (EC 1.1.1.49) from Aspergillus niger. The gene is codon-optimized and synthesized by DNA 2.0 based on the provided amino acid sequence (SEQ ID No118). Restriction sites are added to the sequence during synthesis to allow facile subcloning of the gene into the expression vector. Immediately upstream and adjacent to the translational ATG start codon a HindIII restriction site (AAGCTT) and immediately downstream and adjacent to the TAA translational stop codon Agel restriction sites (ACCGGT) are included. The expression vector is a spectinomycin-resistant plasmid pCL1925 (U.S. Pat. No. 7,074,608) containing the glucose isomerase promoter from Streptomcyes. Vector pCL1925 is digested with HindIII and Agel and the 4.5 kbp vector fragment gel-purified. The gsdA plasmid from DNA 2.0 is digested with the same enzymes to release a 1.5 kbp insert fragment that is gel purified. The vector DNA and insert DNA fragments are ligated with T4 DNA ligase (New England Biolabs, Beverly, Mass.) overnight at 16° C. The ligation is transformed into E. coli K12 MG1655 Δgnd and spread onto LB plates containing 50 μg/mL spectinomycin at 37° C. Transformants are screened by colony PCR as described previously with primers to the vector that flank the insert, pCL1925 vec F (SEQ ID No. 235) and pCL1925 vec R1 (SEQ ID No 236). Plasmids that produce the expected 1.9 kbp product are named pCL1925-gsdA. E. coli K12 MG1655 Δgnd carrying pTrc99A::budB-ilvC-ilvD-kivD-sadB is grown in LB medium containing ampicillin (100 μg/mL) overnight with shaking at 37° C. Overnight cultures are subcultured into the same medium and grown to an OD₆₀₀ of 0.5-0.7 and then harvested by centrifugation to prepare electrocompetent cells. Electrocompetent cells of E. coli K12 MG1655 Δgnd carrying pTrc99A::budB-ilvC-ilvD-kivD-sadB are prepared as described by Ausubel, F. M., et al. (Current Protocols in Molecular Biology, 1987, Wiley-Interscience). Electrocompetent cells are transformed with pCL1925-gsdA. Transformants are spread onto LB agar plates containing 100 μg/mL ampicillin and 50 μg/mL spectinomycin. The resulting strain E. coli K12 MG1655 Δgnd is carrying the isobutanol production plasmid, pTrc99A::budB-ilvC-ilvD-kivD-sadB and the vector pCL1925-gsdA.

### Example 4

### Prophetic

### Production of Isobutanol in E. coli Expressing EDP Genes

[0271] Following construction of an E. coli K12 MG1655 strain carrying the isobutanol production plasmid, pTrc99A::budB-ilvC-ilvD-kivD-sadB, in another step genes encoding enzymes that catalyze phosphogluconate dehydratase reaction (EC 4.2.1.12) and 2-dehydro-3-deoxy-phosphogluconate aldolase reaction (EC 4.1.2.14) are cloned and expressed in E. coli K12 MG1655 pTrc99A::budB-ilvC-ilvD-kivD-sadB using methods described above.

[0272] The gene that encodes phosphogluconate dehydratase reaction (EC 4.2.1.12) is chosen from E. coli, specifically GenBank No: NP_{—}416365.1 (DNA SEQ ID NO:139, Protein SEQ ID: 140 (str. K12 substr. MG1655), and is designated edp3.

[0273] The gene that encodes 2-dehydro-3-deoxy-phosphogluconate aldolase reaction (EC 4.1.2.14) is chosen from E. coli, specifically GenBank No: NP_{—}416364.1 (DNA SEQ ID NO: 208, Protein SEQ ID NO: 209), and is designated edp4.

[0274] In another step, endogenous E coli K12 MG1655 genes encoding 6-phosphofructokinase reaction (EC 2.7.1.11), especially genes pfkA (DNA SEQ ID NO: 165, Protein SEQ ID NO: 166)) and pfkB (DNA SEQ ID NO: 163, Protein SEQ ID NO: 164), fructose-bisphosphate aldolase reaction (EC 4.1.2.13), especially genes fbaA (DNA SEQ ID NO: 179, Protein SEQ ID NO: 180) and fbaB (DNA SEQ ID NO: 177, Protein SEQ ID NO: 178), and 6-phosphogluconate reaction (EC 1.1.1.44), especially gnd (DNA SEQ ID NO: 143, Protein SEQ ID NO: 144), are deleted by tools described above.

[0275] Strain E. coli K12 MG1655 Δgnd ΔpfkA ΔpfkB ΔfbaA ΔfbaB pTrc99A::budB-ilvC-ilvD-kivD-sadB pCL1925-edp3-edp4 is constructed by methods and tools described above. Strain E. coli K12 MG1655 Δgnd ΔpfkA ΔpfkB ΔfbaA ΔfbaB pTrc99A::budB-ilvC-ilvD-kivD-sadB pCL1925-edp3-edp4 is inoculated into a 250 mL shake flask containing 50 mL of LB-medium, 100 μg/mL ampicillin and 50 μg/mL spectinomycin and shaken at 250 rpm and 37° C. The shake flask is closed with a screw cap to prevent gas exchange with environment. After 24 hours, an aliquot of the broth is analyzed by HPLC (as described above for isobutanol content. Isobutanol is detected.

### Example 5

### Prophetic

### Deletion of 6-phosphogluconate Dehydrogenase Genes in Saccharomyces cerevisiae

[0276] The GND1 gene, encoding a first isozyme of 6-phosphogluconate dehydrogenase, is disrupted by insertion of a LEU2 marker cassette by homologous recombination, which completely removes the endogenous GND1 coding sequence. The LEU2 marker in pRS425 (ATCC No. 77106) is PCR-amplified from plasmid DNA using Phusion DNA polymerase (New England Biolabs Inc., Beverly, Mass.; catalog no. F-540S) using primers 4219-T7 and 4219-T8, given as SEQ ID NOs: 237 and 238 which generates a ˜1.8 kb PCR product. The GND1 portion of each primer is derived from the 5′ region upstream of the GND2 promoter and 3′ region downstream of the transcriptional terminator, such that integration of the LEU2 marker results in replacement of the GND1 coding region. The PCR product is transformed into S. cerevisiae BY4741 (ATCC # 201388) using standard genetic techniques (Methods in Yeast Genetics, 2005, Cold Spring Harbor Laboratory Press, Cold Spring Harbor, N.Y., pp. 201-202) and transformants are selected on synthetic complete media lacking leucine and supplemented with 2% glucose at 30° C. Transformants are screened by PCR using primers 4219-T9 and 4219-T10, given as SEQ ID NOs: 239 and 240, to verify integration at the GND1 chromosomal locus with replacement of the GND1 coding region. The identified correct transformants have the genotype: BY4741 gnd1::LEU2.

[0277] The GND2 gene, encoding the second isozyme of 6-phosphogluconate dehydrogenase, is disrupted by insertion of a URA3 marker cassette by homologous recombination, which completely removes the endogenous GND2 coding sequence. The URA3 marker in pRS426 (ATCC No. 77107) is PCR-amplified from plasmid DNA using Phusion DNA polymerase (New England Biolabs Inc., Beverly, Mass.; catalog no. F-5405) using primers 4219-T11 and 4219-T12, given SEQ ID NOs 241 and 242, which generates a ˜1.4 kb PCR product. The GND2 portion of each primer is derived from the 5′ region upstream of the GND2 promoter and 3′ region downstream of the transcriptional terminator, such that integration of the URA3 marker results in replacement of the GND2 coding region. The PCR product is transformed into S. cerevisiae BY4741 (ATCC #201388) using standard genetic techniques (Methods in Yeast Genetics, 2005, Cold Spring Harbor Laboratory Press, Cold Spring Harbor, N.Y., pp. 201-202) and transformants are selected on synthetic complete media lacking uracil and supplemented with 2% glucose at 30° C. Transformants are screened by PCR using primers 4219-T13 and 4219-T14, given as SEQ ID NO: 243 and 244, to verify integration at the GND2 chromosomal locus with replacement of the GND2 coding region. The identified correct transformants have the genotype: BY4741 gnd2::URA3. The URA3 marker is disrupted by plating on 5-fluorootic acid (5FOA; Zymo Research, Orange, Calif.) using standard yeast techniques (Methods in Yeast Genetics, 2005, Cold Spring Harbor Laboratory Press, Cold Spring Harbor, N.Y.) producing strains BY4741 Δgnd2.

### Example 6

### Prophetic

### Expression of Isobutanol Production Pathway in S. cerevisiae

[0278] The purpose of this prophetic example is to describe how to obtain isobutanol production in a yeast strain in which the 6-phosphogluconate dehydrogenase activity has been disrupted. Construction of vectors pRS423::CUP1p-alsS+FBAp-ILV3 and pHR81::FBAp-ILV5-GPMp-kivD is described in US Patent Publication # US20070092957 A1, Example 17. pRS423::CUP1p-alsS+FBAp-ILV3 has a chimeric gene containing the CUP1 promoter (SEQ ID NO:218), the alsS coding region from Bacillus subtilis (SEQ ID NO:1), and CYC1 terminator (SEQ ID NO:219) as well as a chimeric gene containing the FBA promoter (SEQ ID NO: 220), the coding region of the ILV3 gene of S. cerevisiae (SEQ ID NO:7), and the ADH1 terminator (SEQ ID NO:222). pHR81::FBAp-ILV5+GPMp-kivD is the pHR81 vector (ATCC #87541) with a chimeric gene containing the FBA promoter, the coding region of the ILV5 gene of S. cerevisiae (SEQ ID NO:223), and the CYC1 terminator as well as a chimeric gene containing the GPM promoter (SEQ ID NO:224), the coding region from kivD gene of Lactococcus lactis (DNA SEQ ID NO:225, Protein SEQ ID NO: 226), and the ADH1 terminator. pHR81 has URA3 and leu2-d selection markers.

[0279] Plasmid vector pRS423::CUP1p-alsS+FBAp-ILV3, pHR81::FBAp-ILV5+GPMp-kivD is transformed into strain BY4741 using standard genetic techniques (Methods in Yeast Genetics, 2005, Cold Spring Harbor Laboratory Press, Cold Spring Harbor, N.Y.) and maintained on synthetic complete media lacking histidine and uracil, and supplemented with 2% glucose. Aerobic cultures are grown in 250 mL flasks containing 50 mL synthetic complete media lacking histidine and uracil, and supplemented with 2% glucose in an Innova4000 incubator (New Brunswick Scientific, Edison, N.J.) at 30° C. and 225 rpm. The strain is referred to as S. cerevisiae iso⁺.

### Example 7

### Prophetic

### Expression of GSDA from Aspeqillus niger in Saccharomyces cerevisiae iso⁺

[0280] The purpose of this prophetic example is to describe how to obtain an isobutanol producing yeast strain that is disrupted for 6-phosphogluconate dehydrogenase activity, and expresses glucose-6-phosphate dehydrogenase GSDA of Aspergillus niger in the cytosol of S. cerevisiae. Plasmid pRS411 (Brachmann, C B, et al. 1998, Yeast 14:115-132; available from American Type Culture Collection (“ATCC”), Manassas, Va., #87474) will be used for expression of the enzyme.

[0281] The codon-optimized nucleotide sequence encoding the glucose-6-phosphate dehydrogenase from A. niger gsdA protein (SEQ ID NO: 118) is synthesized by DNA 2.0 (Menlo Park, Calif.), based on the provided amino acid sequence (SEQ ID NO: 117). A cloned DNA fragment containing the optimized coding region called gsdA_opt is received from DNA 2.0.

[0282] Next a chimeric gene containing the GPM promoter-gsdA_opt coding region-ADH1terminator is constructed as follows. The gsdA_opt coding region is PCR amplified from plasmid template (supplied from DNA 2.0) using primers 4219-T3 and 4219-T4 (SEQ ID NOs: 245 and 246) that contain additional 5′ sequences that overlap with the yeast GPM1 promoter and ADH1 terminator. The S. cerevisiae GPM1 promoter is PCR amplified from BY4743 genomic DNA (ATCC 201390) using primers 4219-T1 and 4219-T2 (SEQ ID NOs: 247 and 248) that contain additional 5′ sequences that overlap with the pRS411 vector and the gsdA_opt coding region. The S. cerevisiae ADH1 terminator is PCR amplified from BY4743 genomic DNA using primers 4219-T5 and 4219-T6 (SEQ ID NOs: 249 and 225) that contain additional 5′ sequences that overlap with the gsdA_opt coding region and pRS411 vector sequence. The PCR products are then assembled using “gap repair” methodology in S. cerevisiae (Ma et al., Gene, 58: 201-216, 1987).

[0283] The yeast-E. coli shuttle vector pRS411 is linearized by digestion with KpnI SacI restriction enzymes and purified by gel electrophoresis. Approximately 1.0 μg of the purified pRS411 backbone is co-transformed with 1.0 μg of gsdA_opt PCR product and 1.0 μg of GPM1 promoter PCR product, and 1 μg of ADH1 terminator PCR product into S. cerevisiae BY4641. Transformants are selected on the synthetic complete medium lacking methionine and supplemented with 2% glucose at 30° C. The proper recombination event, generating pRS411::GPM-gsdA-ADH1t, is confirmed by DNA sequencing (SEQ ID NO: 226).

### Example 8

### Prophetic

### Production of Isobutanol in S. cerevisiae Expressing EDP

[0284] Following construction of a S. cerevisiae iso⁺ strain carrying the isobutanol production plasmid, pRS423::CUP1p-alsS+FBAp-ILV3 and pHR81::FBAp-ILV5+GPMp-kivD as described above, in another step, genes encoding enzymes that catalyze glucose-6-phosphate dehydrogenase reaction (EC 1.1.1.49), phosphogluconate dehydratase reaction (EC 4.2.1.12), and 2-dehydro-3-deoxy-phosphogluconate aldolase reaction (EC 4.1.2.14) are cloned and expressed in S. cerevisiae iso⁺ by methods and tools described above.

[0285] The gene that encodes glucose-6-phosphate dehydrogenase reaction (EC 1.1.1.49) is from Aspergillus nidulans, specifically GenBank No: XP_{—}660585.1 (DNA SEQ ID NO: 119, Protein SEQ ID NO:120), and is referred to as edp1.

[0286] The gene that encodes phosphogluconate dehydratase reaction (EC 4.2.1.12) is chosen from Pseudomonas putida, specifically GenBank No: NP_{—}743171.1 (DNA SEQ ID NO: 137, Protein SEQ ID NO:138), and is referred to as edp3.

[0287] The gene that encodes 2-dehydro-3-deoxy-phosphogluconate aldolase reaction (EC 4.1.2.14) is chosen from Pseudomonas fluorescens, specifically GenBank No: YP_{—}261692.1 (DNA SEQ ID NO: 204, Protein SEQ ID NO: 205), and is referred to as edp4.

[0288] In another step, endogenous genes of S. cerevisiae encoding 6-phosphofructokinase reaction (EC 2.7.1.11), especially genes PFK1 (DNA SEQ ID NO: 171, Protein SEQ ID NO:172) and PFK2 (DNA SEQ ID NO: 173, Protein SEQ ID NO:174), fructose-bisphosphate aldolase reaction (EC 4.1.2.13), especially gene FBA1 (DNA SEQ ID NO: 185, Protein SEQ ID NO:186-phosphogluconate dehydrogenase reaction (EC 1.1.1.44), especially genes GND1 (DNA SEQ ID NO: 149, Protein SEQ ID NO:150) and GND2 (DNA SEQ ID NO: 147, Protein SEQ ID NO:148), are deleted by methods well known in the art.

[0289] Strain S. cerevisiae ΔGND1 ΔGND2 ΔPFK1 ΔPFK2 ΔFBA1 iso+ pRS411::GPM-edp3-edp4-edp2 is constructed by methods and tools described above. Strains were maintained on standard S. cerevisiae synthetic complete medium (Methods in Yeast Genetics, 2005, Cold Spring Harbor Laboratory Press, Cold Spring Harbor, N.Y., pp. 201-202) containing 2% glucose but lacking methionine, uracil and histidine to ensure maintenance of plasmids. The strain is inoculated into an aerobic 250 mL flasks containing 50 ml synthetic complete media lacking histidine and methionine, and supplemented with 2% glucose in an Innova 4000 incubator (New Brunswick Scientific, Edison, N.J.) at 30° C. and 225 rpm. Low oxygen cultures are prepared by adding 45 mL of medium to 60 mL serum vials that are sealed with crimped caps after inoculation and kept at 30° C. Approximately 24 and 48 hours after induction with 0.03 mM CuSO₄ (final concentration), an aliquot of the broth is analyzed by HPLC as described above for isobutanol content. Isobutanol is detected.

### Example 9

### Prophetic

### Deletion of 6-phosphogluconate Dehydrogenase in Lactobacillus plantarum PN0512

[0290] The purpose of this section is to describe the deletion of the gnd1 gene (SEQ NO: 151) in Lactobacillus plantarum PN0512 to create strain Lactobacillus plantarum PN0512 Δgnd1.

[0291] The Δgnd1 deletion is constructed by a two-step homologous recombination procedure, described above, utilizing a shuttle vector, pFP996. The homologous DNA arms are 1200 bp each and are designed such that the deletion would encompass 497 nucleotides of the gnd1 gene, leaving the first and last 200 nucleotides of the gene intact. The gnd1 left homologous arm is amplified from L. plantarum PN0512 genomic DNA with primers gnd-left-arm-up (SEQ ID NO: 183), containing a BglII site, and gnd-left-arm-down (SEQ ID NO: 158), containing a KpnI site. The gnd1 right homologous arm is amplified from L. plantarum PN0512 genomic DNA with primers gnd-right-arm-up [SEQ ID NO: 182], containing a KpnI site, and gnd-right-arm-down [SEQ ID NO: 181], containing a BsrGI site. The gnd1 left homologous arm is digested with BglII and KpnI and the gnd1 right homologous arm is digested with KpnI and BsrGI. The two homologous arms are ligated with T4 DNA Ligase into the corresponding restriction sites of pFP996, after digestion with the appropriate restriction enzymes, to generate the vector pFP996-gnd1-arms.

[0292] The following procedure is used to generate the deletion: Lactobacillus plantarum PN0512 is transformed with the pFP996-gnd1-arms construct by the following procedure. 5 mL of Lactobacilli MRS medium (Accumedia, Neogen Corporation, Lansing, Mich.) is inoculated with PN0512 and grown overnight at 30° C. 100 mL MRS medium is inoculated with overnight culture to an OD₆₀₀ 0.1 and grown to an OD₆₀₀ 0.7 at 30° C. Cells are harvested at 3700×g for 8 min at 4° C., washed with 100 mL cold 1.0 mM MgCl₂ (Sigma-Aldrich, St. Louis, Mo.), centrifuged at 3700×g for 8 min at 4° C., washed with 100 mL cold 30% PEG-1000 (Sigma-Aldrich, St. Louis, Mo.), recentrifuged at 3700×g for 20 min at 4° C., then resuspended in 1.0 mL cold 30% PEG-1000. 60 μL cells are mixed with ˜100 ng plasmid DNA in a cold 1 mm gap electroporation cuvette and electroporated in a BioRad Gene Pulser (Hercules, Calif.) at 1.7 kV, 25 μF, and 400Ω. Cells are resuspended in 1.0 mL MRS medium containing 500 mM sucrose (Sigma-Aldrich, St. Louis, Mo.) and 100 mM MgCl₂, incubated at 30° C. for 2 hours, and then plated on MRS medium plates containing 2 μg/mL of erythromycin (Sigma-Aldrich, St. Louis, Mo.).

[0293] The presence of the plasmid in transformants is confirmed by colony PCR using plasmid specific primers oBP42 [SEQ ID 170] and oBP57 [SEQ ID 169].

[0294] Transformants are grown at 30° C. in Lactobacilli MRS medium with erythromycin (3 μg/mL) for approximately 10 generations. Transformants are then grown at 37° C. for approximately 50 generations by serial inoculations in Lactobacilli MRS medium. Cultures are plated on Lactobacilli MRS medium with erythromycin (1 μg/mL). Isolates are screened by colony PCR for a single crossover with chromosomal specific primer gnd1-check-up [SEQ ID 168] and plasmid specific primer oBP42 [SEQ ID 170]. Single crossover integrants are grown at 37° C. for approximately 40 generations by serial inoculations in Lactobacilli MRS medium.

Cultures are streaked on the MRS-containing plates and isolates are patched to MRS plates, grown at 37° C., and then patched onto MRS medium with erythromycin (1 μg/mL).

[0295] Erythromycin sensitive isolates are screened by colony PCR for the presence of a wild-type or deletion second crossover using chromosomal specific primers gnd1-check-up [SEQ ID 168] and gnd1-check-down [SEQ ID 167]. A wild-type sequence yields a 3097 by product and a deletion sequence yields a 2600 by product. The deletion is confirmed by sequencing the PCR product. The absence of plasmid is tested by colony PCR using plasmid specific primers oBP42 [SEQ ID 170] and oBP57 [SEQ ID 169].

### Example 10

### Prophetic

### Expression of Isobutanol Production Pathway in Lactobacillus plantarum PN0512

[0296] The purpose of this section is to describe the construction of an isobutanol production plasmid expressing a heterologous dihydroxyacid dehydratase, ketol-acid reductoisomerase, α-ketoisovalerate decarboxylase, alcohol dehydrogenase, and acetolactate synthase. The genes are expressed on a shuttle vector pDM1 (SEQ 157). Plasmid pDM1 contains a minimal pLF1 replicon (˜0.7 Kbp) and pemK-peml toxin-antitoxin(TA) from Lactobacillus plantarum ATCC14917 plasmid pLF1, a P15A replicon from pACYC184, chloramphenicol resistance marker for selection in both E. coli and L. plantarum, and P30 synthetic promoter [Rud et al, Microbiology, 152:1011-1019, 2006].

[0297] Genomic DNA for PCR is prepared with MasterPure DNA Purification Kit (Epicentre, Madison, Wis.) following the recommended protocol. Codon-optimized nucleotide sequences, supplied on plasmids, are synthesized by DNA 2.0 (Menlo Park, Calif.), based on provided amino acid sequences.

[0298] The ilvD gene from Lactococcus lactis subsp. lactis (SEQ ID 109) encoding dihydroxyacid dehydratase (SEQ ID 110) is amplified from genomic DNA with primer ilvD-up (SEQ ID 129), containing a PstI restriction site and ribosome binding site, and primer ilvD-down (SEQ ID 130), containing a DrdI restriction site. The resulting PCR product and pDM1 are ligated after digestion with PstI and DrdI to yield vector pDM1-ilvD with the ilvD gene immediately downstream of the P30 promoter. The IdhL1 promoter region of Lactobacillus plantarum PN0512 (SEQ ID 250) is amplified from genomic DNA with primer PldhL1-up (SEQ ID 145), containing a DrdI restriction site, and primer PldhL1-down (SEQ ID 146), containing BamHI, SacI, PacI, NotI, SalI, and DrdI restriction sites. The resulting PCR product and vector pDM1-ilvD are ligated after digestion with DrdI. Clones are screened by PCR for inserts that are in the same orientation as the ilvD gene using primers ilvD-up (SEQ ID 129) and PldhL1-down (SEQ ID 130). A clone that has the correctly oriented insert is designated pDM1-ilvD-PldhL1. The ilvC gene from Bacillus subtilis, codon optimized for expression in Lactobacillus plantarum (SEQ ID 251), encoding ketol-acid reductoisomerase (SEQ ID 14) is amplified from plasmid DNA (DNA 2.0, see above) with primers ilvC-up (SEQ ID 192), containing a BamHI restriction site and ribosome binding site, and ilvC-down (SEQ ID 193), containing a SacI restriction site. The resulting PCR product and vector pDM1-ilvD-PldhL1 are ligated after digestion with BamHI and SacI to yield vector pDM1-ilvD-PldhL1-ilvC. The kivD gene from Lactococcus lactis subsp. lactis (SEQ ID 189) encoding α-ketoisovalerate decarboxylase (SEQ ID 26) is amplified from genomic DNA with primers kivD-up (SEQ ID 252), containing a SacI restriction site and ribosome binding site, and kivD-down (SEQ ID:253) containing a PacI restriction site. The resulting PCR product and pDM1-ilvD-PldhL1-ilvC are ligated after digestion with SacI and PacI to yield vector pDM1-ilvD-PldhL1-ilvC-kivD. The sadB gene from Achromobacter xylosoxidans (SEQ ID 103) encoding a secondary alcohol dehydrogenase (SEQ ID 104) is amplified from genomic DNA with primers sadB-up (SEQ ID 210), containing a PacI restriction site and ribosome binding site, and sadB-down (SEQ ID 211), containing a NotI restriction site. The resulting PCR product and pDM1-ilvD-PldhL1-ilvC-kivD are ligated after digestion with PacI and NotI to yield vector pDM1-ilvD-PldhL1-ilvC-kivD-sadB. The alsS gene from Bacillus subtilis, codon optimized for expression in Lactobacillus plantarum (SEQ ID 254), encoding acetolactate synthase (SEQ ID 2) is amplified from plasmid DNA (DNA 2.0, see above) with primers alsS-up (SEQ ID 255), containing a NotI restriction site and ribosome binding site, and alsS-down (SEQ ID 256), containing a SalI restriction site. The resulting PCR product and pDM1-ilvD-PldhL1-ilvC-kivD-sadB are ligated after digestion with NotI and SalI to yield the isobutanol vector pDM1-ilvD-PldhL1-ilvC-kivD-sadB-alsS. Lactobacillus plantarum strain PN0512 is transformed with vector pDM1-ilvD-PldhL1-ilvC-kivD-sadB-alsS as described above. Transformants are selected on MRS medium containing chloramphenicol (10 μg/ml) and result in strain PN0512 pDM1-ilvD-PldhL1-ilvC-kivD-sadB-alsS. The strain contains all five genes of the isobutanol pathway on the plasmid.

### Example 11

### Prophetic

### Expression of gsdA from Aspergillus niger in Lactobacillus plantarum PN0512 iso⁺

[0299] The purpose of this prophetic example is to describe how to obtain an isobutanol producing Lactobacillus plantarum strain that expresses glucose-6-phosphate dehydrogenase GSDA of Aspergillus niger.

[0300] Vector pFP996PIdhL1 (SEQ ID NO: 142) is a shuttle vector with two origins of replication and two selectable markers which allow for replication and selection in both E. coli and L. plantarum. The vector contains the promoter region from the Lactobacillus plantarum PN0512 IdhL1 gene for expression of genes in L. plantarum. The A. niger gsdA gene encoding glucose-6-phosphate dehydrogenase is amplified with primers FP996-gsdA-up [SEQ ID 141], containing an XmaI site and a ribosome binding site, and FP996-gsdA-down [SEQ ID 184], containing a KpnI site. The template for the PCR reaction is plasmid DNA containing the A. niger gsdA coding sequence [SEQ ID 117] which is synthesized by DNA 2.0 (Manlo Park, Calif.). The resulting PCR fragment and pFP996PIdhL1 are ligated after digestion with XmaI and KpnI to create vector pFP996PIdhL1-gsdA(An).

[0301] L. plantarum strain PN0512 pDM1-ilvD-PldhL1-ilvC-kivD-sadB-alsS is transformed with vector pFP996PIdhL1-gsdA(An) as described above. Transformants are selected on MRS medium containing erythromycin (3 μg/mL) and chloramphenicol (10 μg/mL) and result in strain L. plantarum PN0512 pDM1-ilvD-PldhL1-ilvC-kivD-sadB-alsS pFP996PldhL1-gsdA(An).

### Example 12

### Prophetic

### Production of Isobutanol in L. plantarum Expressing EDP

[0302] Following construction of an L. plantarum PN0512 strain carrying the isobutanol production plasmid, pDM1-ilvD-PldhL1-ilvC-kivD-sadB-alsS, in another step genes encoding enzymes that catalyze glucose-6-phosphate dehydrogenase reaction (EC 1.1.1.49), phosphogluconate dehydratase reaction (EC 4.2.1.12), and 2-dehydro-3-deoxy-phosphogluconate aldolase reaction (EC 4.1.2.14) are cloned and expressed in L. plantarum PN0512 pDM1-ilvD-PldhL1-ilvC-kivD-sadB-alsS by tools described above.

[0303] The gene encoding glucose-6-phosphate dehydrogenase reaction (EC 1.1.1.49) is from Aspergillus niger, specifically GenBank No: CAA61194.1 (DNA SEQ ID NO:117, Protein SEQ ID NO:118) and is referred to as edp1.

[0304] The gene that encodes phosphogluconate dehydratase reaction (EC 4.2.1.12) is chosen from Zymomonas mobilis, specifically GenBank No: YP_{—}162103.1 (DNA SEQ ID NO:135, Protein SEQ ID: 136) and are referred to as edp3.

[0305] The gene that encodes 2-dehydro-3-deoxy-phosphogluconate aldolase reaction (EC 4.1.2.14) is from Pseudomonas putida, specifically GenBank No: NP_{—}743185.1 (DNA SEQ ID NO: 202, Protein SEQ ID NO: 203) and is referred to as edp4.

[0306] In another step, genes that encode the endogenous, chromosomal glucose-6-phosphate dehydrogenase reaction (EC 1.1.1.49), especially gene zwf (DNA SEQ ID NO: 131, Protein SEQ ID NO: 132), 6-phosphofructokinase reaction (EC 2.7.1.11), especially gene pfkA (DNA SEQ ID NO: 175, Protein SEQ ID NO: 176), fructose-bisphosphate aldolase reaction (EC 4.1.2.13), especially genes fba (DNA SEQ ID NO: 187, Protein SEQ ID NO: 188), 6-phospho-gluconate dehydrogenase reaction (EC 1.1.1.44), especially genes gnd1 (DNA SEQ ID NO: 151, Protein SEQ ID NO: 152) and gnd2 (DNA SEQ ID NO: 153, Protein SEQ ID NO: 154), are deleted by tools described above.

[0307] Strain L. plantarum PN0512 Δgnd1 Δgnd2 Δzwf ΔpfkA Δfba pDM1-ilvD-PldhL1-ilvC-kivD-sadB-alsS pFP996PldhL1-edp1-edp3-edp4 is constructed by methods and tools described above. Strain L. plantarum PN0512 Δgnd1 Δgnd2 Δzwf ΔpfkA Δfba pDM1-ilvD-PldhL1-ilvC-kivD-sadB-alsS pFP996PIdhL1-edp1-edp3-edp4 is grown overnight in Lactobacilli MRS medium with 10 μg/ml chloramphenicol and 3 μg/ml erythromycin at 30° C. as described above and the culture supernatant is analyzed by HPLC for isobutanol content. Isobutanol is detected.

### Example 13

### Construction of an E. coli Strain Having Deletions of pfIB, frdB, IdhA, adhE, qnd, pfkA, pfkB, fbaA and fbaB Genes

[0308] This Example describes engineering of an E. coli strain in which nine genes were inactivated. The Keio collection of E. coli strains (Baba et al., Mol. Syst. Biol., 2:1-11, 2006) was used for production of eight of the knockouts. The Keio collection (available from NBRP at the National Institute of Genetics, Japan) is a library of single gene knockouts created in strain E. coli BW25113 by the method of Datsenko and Wanner (Datsenko, K. A. & Wanner, B. L., Proc Natl Acad. Sci., USA, 97: 6640-6645, 2000). In the collection, each deleted gene was replaced with a FRT-flanked kanamycin marker that was removable by Flp recombinase. The E. coli strain carrying multiple knockouts was constructed by moving the knockout-kanamycin marker from the Keio donor strain by bacteriophage P1 transduction to a recipient strain. After each P1 transduction to produce a knockout, the kanamycin marker was removed by Flp recombinase. This markerless strain acted as the new recipient strain for the next P1 transduction. One of the described knockouts was constructed directly in the strain using the method of Datsenko and Wanner (supra) rather than by P1 transduction.

[0309] The 4KO E. coli strain was constructed in the Keio strain JW0886 by P1ᵥᵢᵣ transductions with P1 phage lysates prepared from three Keio strains. The Keio strains used are listed below:
[0310] JW0886: the kan marker is inserted in the pflB
[0311] JW4114: the kan marker is inserted in the frdB
[0312] JW1375: the kan marker is inserted in the IdhA
[0313] JW1228: the kan marker is inserted in the adhE

[0314] To construct the final strain the Keio strains listed below were also utilized as a source of the inactivated genes:
[0315] JW2011: the kan marker is inserted in the gnd
[0316] JW3887: the kan marker is inserted in the pfkA
[0317] JW5280: the kan marker is inserted in the pfkB
[0318] JW5344: the kan marker is inserted in the fbaB

[0319] [Sequences corresponding to the inactivated genes are: pflB (SEQ ID NO: 260), frdB (SEQ ID NO: 264), IdhA (SEQ ID NO: 272), adhE (SEQ ID NO: 270), gnd (SEQ ID NO:143), pfkA (Seq ID NO: 165), pfkB (SEQ ID NO: 163), and fbaB (SEQ ID NO: 177).] Additionally the fbaA gene (SEQ ID NO: 179) was inactivated in the final strain. The fbaA gene deletion is not in the Keio collection. The fbaA gene was inactivated directly in the final strain using the Datsenko and Wanner method (supra), except a loxP-flanked kanamycin marker was used instead of a FRT flanked kanamycin marker to replace the native gene.

[0320] Removal of the FRT-flanked kanamycin marker from the chromosome was performed by transforming the kanamycin-resistant strain with pCP20 an ampicillin-resistant plasmid (Cherepanov, and Wackernagel, supra)). Transformants were spread onto LB plates containing 100 μg/mL ampicillin. Plasmid pCP20 carries the yeast FLP recombinase under the control of the γ_{P}_{_{R}} promoter and expression from this promoter is controlled by the c1857 temperature-sensitive repressor residing on the plasmid. The origin of replication of pCP20 is also temperature-sensitive.

[0321] Removal of the loxP-flanked kanamycin marker from the chromosome was performed by transforming the kanamycin-resistant strain with pJW168 an ampicillin-resistant plasmid (Wild et al., Gene. 223:55-66, 1998) harboring the bacteriophage P1 Cre recombinase. Cre recombinase (Hoess, R. H. & Abremski, K., supra) meditates excision of the kanamycin resistance gene via recombination at the loxP sites. The origin of replication of pJW168 is the temperature-sensitive pSC101. Transformants were spread onto LB plates containing 100 μg/mL ampicillin.

[0322] Strain JW0886 (ΔpflB::kan) was transformed with plasmid pCP20 and spread on the LB plates containing 100 μg/mL ampicillin at 30° C. Ampicillin resistant transformants were then selected, streaked on the LB plates and grown at 42° C. Isolated colonies were patched onto the ampicillin and kanamycin selective medium plates and LB plates. Kanamycin-sensitive and ampicillin-sensitive colonies were screened by colony PCR with primers pflB CkUp (SEQ ID NO: 297) and pflB CkDn (SEQ ID NO: 298). A 10 μL aliquot of the PCR reaction mix was analyzed by gel electrophoresis. The expected approximate 0.4 kb PCR product was observed confirming removal of the marker and creating the “JW0886 markerless” strain. This strain has a deletion of the pflB gene.

[0323] The “JW0886 markerless” strain was transduced with a P1ᵥᵢᵣ lysate from JW4114 (frdB::kan) and streaked onto the LB plates containing 25 μg/mL kanamycin. The kanamycin-resistant transductants were screened by colony PCR with primers frdB CkUp (SEQ ID NO: 299) and frdB CkDn (SEQ ID NO: 300). Colonies that produced the expected approximate 1.6 kb PCR product were made electrocompetent and transformed with pCP20 for marker removal as described above. Transformants were first spread onto the LB plates containing 100 μg/mL ampicillin at 30° C. and ampicillin resistant transformants were then selected and streaked on LB plates and grown at 42° C. Isolated colonies were patched onto ampicillin and the kanamycin selective medium plates and LB plates. Kanamycin-sensitive, ampicillin-sensitive colonies were screened by PCR with primers frdB CkUp (SEQ ID NO: 299) and frdB CkDn (SEQ ID NO: 300). The expected approximate 0.4 kb PCR product was observed confirming marker removal and creating the double knockout strain, “ΔpflB frdB”.

[0324] The double knockout strain was transduced with a P1ᵥᵢᵣ lysate from JW1375 (ΔldhA::kan) and spread onto the LB plates containing 25 μg/mL kanamycin. The kanamycin-resistant transductants were screened by colony PCR with primers IdhA CkUp (SEQ ID NO: 301) and IdhA CkDn (SEQ ID NO: 302). Clones producing the expected 1.5 kb PCR product were made electrocompetent and transformed with pCP20 for marker removal as described above. Transformants were spread onto LB plates containing 100 μg/mL ampicillin at 30° C. and ampicillin resistant transformants were streaked on LB plates and grown at 42° C. Isolated colonies were patched onto ampicillin and kanamycin selective medium plates and LB plates. Kanamycin-sensitive, ampicillin-sensitive colonies were screened by PCR with primers IdhA CkUp (SEQ ID NO: 301) and IdhA CkDn (SEQ ID NO: 302) for a 0.3 kb product. Clones that produced the expected approximate 0.3 kb PCR product confirmed marker removal and created the triple knockout strain designated “3KO” (ΔpflB frdB IdhA).

[0325] Strain “3 KO” was transduced with a P1ᵥᵢᵣ lysate from JW1228 (ΔadhE::kan) and spread onto the LB plates containing 25 μg/mL kanamycin. The kanamycin-resistant transductants were screened by colony PCR with primers adhE CkUp (SEQ ID NO: 303) and adhE CkDn (SEQ ID NO: 304). Clones that produced the expected 1.6 kb PCR product were named 3KO adhE::kan. Strain 3KO adhE::kan was made electrocompetent and transformed with pCP20 for marker removal. Transformants were spread onto the LB plates containing 100 μg/mL ampicillin at 30° C. Ampicillin resistant transformants were streaked on the LB plates and grown at 42° C. Isolated colonies were patched onto ampicillin and kanamycin selective plates and LB plates. Kanamycin-sensitive, ampicillin-sensitive colonies were screened by PCR with the primers adhE CkUp (SEQ ID NO: 303) and adhE CkDn (SEQ ID NO: 304). Clones that produced the expected approximate 0.4 kb PCR product were named “4KO” (ΔpflB frdB IdhA adhE).

[0326] Strain “4 KO” was transduced with a P1ᵥᵢᵣ lysate from JW2011 (Δgnd::kan) and spread onto the LB plates containing 25 μg/mL kanamycin. The kanamycin-resistant transductants were screened by colony PCR with primers gnd CkF (SEQ ID NO: 305) and gnd CkR (SEQ ID NO: 306). Clones that produced the expected 1.6 kb PCR product were named 4KO gnd::kan and were made electrocompetent and transformed with pCP20 for marker removal. Transformants were spread onto the LB plates containing 100 μg/mL ampicillin at 30° C. Ampicillin resistant transformants were streaked on the LB plates and grown at 42° C. Isolated colonies were patched onto ampicillin and kanamycin selective plates and LB plates. Kanamycin-sensitive, ampicillin-sensitive colonies were screened by PCR with the primers gnd CkF (SEQ ID NO: 305) and gnd CkR (SEQ ID NO: 306). Clones that produced the expected approximate 0.4 kb PCR product were named “4KO gnd” (ΔpflB frdB IdhA adhE gnd).

[0327] Strain “4 KO gnd” was transduced with a P1ᵥᵢᵣ lysate from JW3887 (ΔpfkA::kan) and spread onto the LB plates containing 25 μg/mL kanamycin. The kanamycin-resistant transductants were screened by colony PCR with primers pfkA CkF (SEQ ID NO: 307) and pfkA CkR2 (SEQ ID NO: 308). Clones that produced the expected 1.6 kb PCR product were named 5KO pfkA::kan (ΔpflB frdB IdhA adhE gnd pfkA::kan) and were made electrocompetent and transformed with pCP20 for marker removal. Transformants were spread onto the LB plates containing 100 μg/mL ampicillin at 30° C. Ampicillin resistant transformants were streaked on the LB plates and grown at 42° C. Isolated colonies were patched onto ampicillin and kanamycin selective plates and LB plates. Kanamycin-sensitive, ampicillin-sensitive colonies were screened by PCR with the primers pfkA CkF (SEQ ID NO: 307) and pfkA CkR2 (SEQ ID NO: 308). Clones that produced the expected approximate 0.3 kb PCR product were named “5 KO pfkA” (ΔpflB frdB IdhA adhE gnd pfkA).

[0328] Strain “5KO pfkA” was transduced with a P1ᵥᵢᵣ lysate from JW5280 (ΔpfkB::kan) and spread onto the LB plates containing 25 μg/mL kanamycin. The kanamycin-resistant transductants were screened by colony PCR with primers pfkB CkF2 (SEQ ID NO:309) and pfkB CkR2 (SEQ ID NO: 310). Clones that produced the expected 1.7 kb PCR product were named 6KO pfkB::kan (ΔpflB frdB IdhA adhE gnd pfkA pfkB::kan). and made electrocompetent and transformed with pCP20 for marker removal. Transformants were spread onto the LB plates containing 100 μg/mL ampicillin at 30° C. Ampicillin resistant transformants were streaked on the LB plates and grown at 42° C. Isolated colonies were patched onto ampicillin and kanamycin selective plates and LB plates. Kanamycin-sensitive, ampicillin-sensitive colonies were screened by PCR with the primers pfkB CkF2 (SEQ ID NO: 309) and pfkB CkR2 (SEQ ID NO: 310). Clones that produced the expected approximate 0.5 kb PCR product were named “6KO pfkB::” (ΔpflB frdB IdhA adhE gnd pfkA pfkB).

[0329] Gene deletions in E. coli can be carried out by standard molecular biology techniques appreciated by one skilled in the art. To create an fbaA deletion in E. coli “4KO gpp”, the gene is deleted by replacing it with a kanamycin resistance marker using the Lambda Red-mediated homologous recombination system as described by Datsenko and Wanner (supra). PCR amplification with pLoxKan2 (Palmeros et al., Gene 247:255-264, 2000) as template and primers fbaA H1 P1 lox (SEQ ID NO: 311) and fbaA H2 P4 lox (SEQ ID NO: 312) produces a 1.4 kb product. Primer H1 consists of the first 50 by of the CDS of fbaA followed by 22 nucleotides homologous to a binding site upstream of a loxP site in pLoxKan2. The H2 primer consists of the last 43 base pairs of the fbaA CDS and 7 by downstream of the CDS followed by 20 bps homologous to binding site downstream of a loxP site in pLoxKan2. PCR amplification uses the HotStarTaq Master Mix (Qiagen, Valencia, Calif.; catalog no. 71805-3) according to the manufacturer's protocol. Amplification is carried out in a DNA Thermocycler GeneAmp 9700 (PE Applied Biosystems, Foster City, Calif.). PCR conditions were: 15 min at 95° C.; 30 cycles of 95° C. for 30 sec, annealing temperature of 63° C. for 30 sec, an extension time of approximately 1 min/kb of DNA at 72° C.; then 10 min at 72° C. followed by a hold at 4° C. After amplification the PCR reaction is loaded onto a 1% agarose gel in TBE buffer and electrophoresed at 50 volts for approximately 30 minutes. The PCR product is gel-purified from a 1% agarose gel with a Zymoclean Gel Extraction Kit (Zymo Research Corp. Orange, Calif.).

[0330] E. coli “6KO pfkB” is made electrocompetent as described by Ausubel, F. M., et al., (Current Protocols in Molecular Biology, 1987, Wiley-Interscience,). and transformed with pKD46, the temperature sensitive Red recombinase plasmid (Datsenko and Wanner, supra). For electroporation a Bio-Rad Gene Pulser II was used according to the manufacturer's instructions (Bio-Rad Laboratories Inc, Hercules, Calif.). After electroporation cells are outgrown in SOC medium (2% Bacto Tryptone (Difco), 0.5% yeast extract (Difco), 10 mM NaCl, 2.5 mM KCL, 10 mM MgCl₂, 10 mM MgSO₄, 20 mM glucose) for 2 hours at 30° C. with shaking. Transformants are spread on LB plates containing 50 μg/ml ampicillin and incubated overnight at 30° C. Transformants are streaked on LB plates containing 50 μg/ml ampicillin and incubated overnight at 30° C. An isolated colony of E. coli “6KO pfkB” carrying pKD46 was grown in 3 ml LB medium with 50 μg/mL ampicillin overnight at 30 C with shaking. One-half milliliter of the overnight culture was diluted into 50 ml LB medium with 50 μg/mL ampicillin and grown at 30 C with shaking. At an OD600 of approximately 0.2. L-arabinose was added to a final concentration of 20 mM and incubation with shaking continued at 30° C. Cells were harvested by centrifugation at an OD600 of 0.5-0.7. Electrocompetent cells of E. coli “6KO pfkB”/pKD46 are then prepared as described above and electrotransformed with up to 1 μg of the 1.4 kb PCR product of the kanamycin marker flanked by loxP sites and homology to fbaA. For electroporation a Bio-Rad Gene Pulser II was used according to the manufacturer's instructions (Bio-Rad Laboratories Inc, Hercules, Calif.). After electroporation cells are outgrown in SOC medium (2% Bacto Tryptone (Difco), 0.5% yeast extract (Difco), 10 mM NaCl, 2.5 mM KCL, 10 mM MgCl₂, 10 mM MgSO₄, 20 mM glucose) for 2 hours at 30° C. with shaking. Transformants are spread onto LB plates containing 25 μg/mL kanamycin and incubated overnight at 42° C. to cure the temperature sensitive Red recombinase plasmid.

[0331] Transformants are patched to grids onto LB plates containing kanamycin (25 μg/mL), and LB ampicillin (100 μg/mL) to test for loss of the ampicillin resistant recombinase plasmid, pKD46. Ampillicin-sensitive kanamycin resistant transformants are further analyzed by colony PCR using primers fbaA Ck UP (SEQ ID NO: 313) and fbaA Ck Dn (SEQ ID NO: 314), for the expected 1.5 kb PCR fragment. Clones producing the expected size PCR product were designated E. coli K12 7KO fbaA::kan ((ΔpflB frdB IdhA adhE gnd pfkA pfkB fba::kan).

[0332] E. coli K12 7KO fbaA::kan were made electrocompetent and transformed with pJW168 (Wild, et al., supra) for marker removal. Transformants were spread onto the LB plates containing 100 μg/mL ampicillin at 30° C. Ampicillin resistant transformants were streaked on the LB plates and grown at 42° C. Isolated colonies were patched onto ampicillin and kanamycin selective plates and LB plates. Kanamycin-sensitive, ampicillin-sensitive colonies were screened by PCR amplification with the primers fbaA Ck UP (SEQ ID NO: 313) and fbaA Ck Dn (SEQ ID NO: 314) A 10 μL aliquot of the PCR reaction mix was analyzed by gel electrophoresis. Clones that produced the expected approximate 0.3 kb PCR product were named “7KO fbaA” (ΔpflB frdB IdhA adhE gnd pfkA pfkB fbaA).

[0333] Strain “7KO fbaA” was transduced with a P1ᵥᵢᵣ lysate from JW5344 (ΔfbaB::kan) and spread onto the LB plates containing 25 μg/mL kanamycin. The kanamycin-resistant transductants were screened by colony PCR with primers fbaB CkF2 (SEQ ID NO: 315) and fbaB CkR2 (SEQ ID NO: 316). Clones that produced the expected 1.6 kb PCR product were named “8KO fbaB::kan (ΔpflB frdB IdhA adhE gnd pfkA pfkB fbaA fbaB::kan).

### Example 14

### Construction of an Isobutanol Biosynthetic Pathway

[0334] A DNA fragment encoding sad B, a butanol dehydrogenase, (DNA SEQ ID NO:103; protein SEQ ID NO: 104) from Achromobacter xylosoxidans was amplified from A. xylosoxidans genomic DNA using standard conditions. The DNA was prepared using a Gentra Puregene kit (Gentra Systems, Inc., Minneapolis, Minn.; catalog number D-5500A) following the recommended protocol for gram negative organisms. PCR amplification was done using forward and reverse primers N473 and N469 (SEQ ID NOs: 231 and 232), respectively with Phusion High Fidelity DNA Polymerase (New England Biolabs, Beverly, Mass.). The PCR product was TOPO-Blunt cloned into pCR4 BLUNT (Invitrogen) to produce pCR4Blunt::sadB, which was transformed into E. coli Mach-1 cells. Plasmid was subsequently isolated from four clones, and the sequence verified.

[0335] The sadB coding region was then cloned into the vector pTrc99a (Amann et al., Gene 69: 301-315, 1988). The pCR4Blunt::sadB was digested with EcoRI, releasing the sadB fragment, which was ligated with EcoRI-digested pTrc99a to generate pTrc99a::sadB. This plasmid was transformed into E. coli Mach 1 cells and the resulting transformant was named Mach1/pTrc99a::sadB. The activity of the enzyme expressed from the sadB gene in these cells was determined to be 3.5 mmol/min/mg protein in cell-free extracts when analyzed using isobutyraldehyde as the standard.

[0336] The sadB gene was then subcloned into pTrc99A::budB-ilvC-ilvD-kivD as described below. The pTrc99A::budB-ilvC-ilvD-kivD is the pTrc-99a expression vector carrying an operon for isobutanol expression (described in Examples 9-14 the of U.S. Published Patent Application No. 20070092957, which are incorporated herein by reference). The first gene in the pTrc99A::budB-ilvC-ilvD-kivD isobutanol operon is budB encoding acetolactate synthase from Klebsiella pneumoniae ATCC 25955, followed by the ilvC gene encoding acetohydroxy acid reductoisomerase from E. coli. This is followed by ilvD encoding acetohydroxy acid dehydratase from E. coli and lastly the kivD gene encoding the branched-chain keto acid decarboxylase from L. lactis.

[0337] The sadB coding region was amplified from pTrc99a::sadB using primers N695A (SEQ ID NO: 233) and N696A (SEQ ID NO: 234) with Phusion High Fidelity DNA Polymerase (New England Biolabs, Beverly, Mass.). Amplification was carried out with an initial denaturation at 98 C. for 1 min, followed by 30 cycles of denaturation at 98° C. for 10 sec, annealing at 62° C. for 30 sec, elongation at 72° C. for 20 sec and a final elongation cycle at 72° C. for 5 min, followed by a 4° C. hold. Primer N695A contained an AvrII restriction site for cloning and a RBS upstream of the ATG start codon of the sadB coding region. The N696A primer included an XbaI site for cloning. The 1.1 kb PCR product was digested with AvrII and XbaI (New England Biolabs, Beverly, Mass.) and gel purified using a Qiaquick Gel Extraction Kit (Qiagen Inc., Valencia, Calif.)). The purified fragment was ligated with pTrc99A::budB-ilvC-ilvD-kivD, that had been cut with the same restriction enzymes, using T4 DNA ligase (New England Biolabs, Beverly, Mass.). The ligation mixture was incubated at 16° C. overnight and then transformed into E. coli Mach 1™ competent cells (Invitrogen) according to the manufacturer's protocol. Transformants were obtained following growth on the LB agar with 100 μg/ml ampicillin. Plasmid DNA from the transformants was prepared with QIAprep Spin Miniprep Kit (Qiagen Inc., Valencia, Calif.) according to manufacturer's protocols. The resulting plasmid was called pTrc99A::budB-ilvC-ilvD-kivD-sadB.

[0338] Electrocompetent cells of the strains listed in Table 8 were prepared as described and transformed with pTrc99A::budB-ilvC-ilvD-kivD-sadB (“pBCDDB”). Transformants were streaked onto LB agar plates containing 100 μg/mL ampicillin.

### Example 15

### Construction of an E. coli Production Host Containing an Isobutanol Biosynthetic Pathway and an Overexpression Plasmid Containing edp3-edp4

[0339] A DNA fragment encoding Phosphogluconate dehydratase (EC 4.2.1.12) (6-phosphogluconate dehydratase, (edp3)) (DNA SEQ ID NO: 139; protein SEQ ID NO: 140) and 2-dehydro-3-deoxy-phosphogluconate aldolase, (edp4) (EC 4.1.2.14) (protein SEQ ID NO: 209) (DNA SEQ ID NO 208 (edd-eda operon)) from E. coli MG1655 was amplified from E. coli genomic DNA using standard conditions. The DNA was prepared using a Gentra Puregene kit (Gentra Systems, Inc., Minneapolis, Minn.; catalog number D-5500A) following the recommended protocol for gram negative organisms. PCR amplification was done using forward and reverse primers EE F and EE R (SEQ ID NOs:317 and 318), respectively with Phusion High Fidelity DNA Polymerase (New England Biolabs, Beverly, Mass.). The forward primer incorporated an optimized E. coli RBS and a HindIII restriction site. The reverse primer included an XbaI restriction site. The 2.5 kb PCR product was cloned into pCR® 4Blunt-TOPO® (Invitrogen Corp. (Carlsbad, Calif.) to produce pCR4Blunt::edd-eda (edp3-edp4). The plasmid was transformed into E. coli Top10 cells. Plasmids from three clones were sequenced with primers EE Seq F2 (SEQ ID NO: 319) EE Seq F4 (SEQ ID NO: 320), EE Seq R4 (SEQ ID NO: 321) and EE Seq R3 (SEQ ID NO: 322) and the sequence verified.

[0340] The edd-eda coding region was then cloned into the vector pCL1925 (described in U.S. Pat. No. 7,074,608), a low copy plasmid carrying the glucose isomerase promoter from Streptomyces. The pCR4Blunt::edd-eda was digested with HindIII and XbaI and the 2.5 kb edd-eda fragment gel purified. The vector pCL1925 was cut with HindIII and XbaI and the 4.5 kb vector fragment gel purified. The edd-eda fragment was ligated with the pCL1925 vector fragment using T4 DNA ligase (New England Biolabs, Beverly, Mass.). The ligation mixture was incubated at 16° C. overnight and then transformed into E. coli Top10 cells creating pCL1925-edp3-edp4 (pED). Transformants were plated onto LB agar containing 50 μg/ml spectinomycin. A transformant was grown in LB 50 μg/ml spectinomycin and plasmid prepared using the QIAprep Spin Miniprep kit (Qiagen, Valencia, Calif.) according to manufacturer's recommendation.

[0341] The strain 8KO fbaB::kan containing pTrc99A::budB-ilvC-ilvD-kivD-sadB (pBCDDB) was made electrocompetent as previously described and transformed with pCL1925-edp3-edp4, also named “pED”. Transformants were plated onto LB agar containing 50 μg/ml spectinomycin and 100 μg/mL ampicillin.

### Example 16

### Production of Isobutanol in E. coli with Diminished Oxidative Pentose Phosphate and/or EMP and Functional EDP

[0342] E. coli K12 strains “E. coli 3KO adhE::kan” (E. coli K12 ΔpflB ΔfrdB ΔldhA ΔadhE::kan), “E. coli 4KO gnd::kan” (E. coli K12 ΔpflB ΔfrdB ΔldhA ΔadhE Δgnd::kan), “E. coli 5KO pfkA::kan” (E. coli K12 ΔpflB ΔfrdB ΔldhA ΔadhE Δgnd ΔpfkA::kan), “E. coli 6KO pfkB::kan” (E. coli K12 ΔpflB ΔfrdB ΔldhA ΔadhE Δgnd ΔpfkA ΔpfkB::kan), “E. coli 7KO fbaA::kan” (E. coli K12 ΔpflB ΔfrdB ΔldhA ΔadhE Δgnd ΔpfkA ΔpfkB ΔfbaA::kan), “E. coli 8KO fbaB::kan” (E. coli K12 ΔpflB ΔfrdB ΔldhA ΔadhE Δgnd ΔpfkA ΔpfkB ΔfbaA ΔfbaB::kan) were constructed as described in Example 13 in E. coli K-12 BW25113 and transformed with the isobutanol pathway plasmid, “+pBCDDB”. Additionally strain “E. coli 8KO fbaB::kan+pBCDDB” was also transformed with an overexpression plasmid “pED” containing “edp3” and “edp4” (pCL1925-edp3-edp4), described in more detail in Example 15, creating “E. coli 8KO fbaB::kan+pBCDDB+pED”. The Keio collection host strain, E. coli K-12 BW25113 was transformed with pTrc99a as an empty vector control, creating “E. coli BW25113+pTrc”.

[0343] Frozen glycerol stock cultures of the strains were generated by inoculating a single colony from selective antibiotic LB plates into 100 ml baffled Erlenmeyer shake flasks, filled with 20 ml LB medium and 100 μg/ml carbenicillin. Additionally 50 μg/ml spectinomycin had been added to the E. coli 8KO fbaB::kan+pBCDDB+pED culture. When the cultures reached an optical density of approximately 1.000 at λ=600 nm, 0.7 ml portions of the respective culture were transferred into 2 ml cryogenic vials (Nalgene, Rochester, N.Y.), 0.3 ml of sterile glycerol added, the cap closed and the vial vortexed for about 20 seconds. Subsequently the vials were immediately stored in the freezer at −80° C.

[0344] 10 μl of frozen glycerol stocks from strains E. coli BW25113+pTrc, E. coli 3KO adhE::kan+pBCDDB, E. coli 4KO gnd::kan+pBCDDB, E. coli 5KO pfkA::kan+pBCDDB, E. coli 6KO pfkB::kan+pBCDDB, E. coli 7KO fbaA::kan+pBCDDB, E. coli 8KO fbaB::kan+pBCDDB and 15 μl of frozen glycerol stock from strain E. coli 8KO fbaB::kan+pBCDDB+pED were each inoculated into 15 ml culture tubes filled with 3.5 ml LB medium and 100 μg/ml carbenicillin. Additionally 50 μg/ml spectinomycin had been added to the E. coli 8KO fbaB::kan+pBCDDB+pED culture. The aerobic cultures were incubated over night at 30° C. and 250 rpm in an Innova Laboratory Shaker (New Brunswick Scientific, Edison, N.J.).

[0345] The next day 0.26 ml of the overnight culture from strain E. coli BW25113+pTrc, 0.28 ml of the overnight culture from strain E. coli 3KO adhE::kan+pBCDDB, 0.28 ml of the overnight culture from strain E. coli 4KO gnd::kan+pBCDDB, 0.30 ml of the overnight culture from strain E. coli 5KO pfkA::kan+pBCDDB, 0.30 ml of the overnight culture from strain E. coli 6KO pfkB::kan+pBCDDB, 0.32 ml of the overnight culture from strain E. coli 7KO fbaA::kan+pBCDDB, 0.30 ml of the overnight culture from strain E. coli 8KO fbaB::kan+pBCDDB and 0.30 ml of the overnight culture from strain E. coli 8KO fbaB::kan+pBCDDB+pED were transferred under anaerobic conditions (anaerobic chamber from Coy Laboratory Products, Grass Lake, Mich.) into 25 ml Balch tubes filled with 12 ml growth medium. For each strain 4 cultures (n =4) were inoculated and analyzed accordingly, with the exception of strain E. coli 3KO adhE::kan+pBCDDB, for which only 3 cultures (n=3) were inoculated and analyzed.

[0346] Initial optical densities at λ=600 nm measured with an Ultrospec 3000 spectrophotometer (Pharmacia Biotech, Piscataway, N.J.) were in average 0.144±0.005, 0.084±0.002, 0.088±0.007, 0.090±0.004, 0.099±0.001, 0.099±0.002, 0.104±0.002 and 0.093±0.002, respectively (see Table 8). The growth medium consisted of LB medium with about 20 g/l glucose, 0.1 M MOPs buffer at pH=7.0 and 100 μg/ml carbenicillin added. Growth medium of strain E. coli 8KO fbaB::kan+pBCDDB+pED contained in addition 50 μg/ml spectinomycin. Each Balch tube was fitted with a butyl rubber septum which allowed periodic gas and liquid sampling via syringe. The stopper was cramped to the tube with a sheet metal with circular opening on top for sampling with a syringe with needle through the rubber septum. The tubes were fixed at an angle of about 60° relative to the shaker plate and incubated in an Innova Laboratory Shaker (New Brunswick Scientific, Edison, N.J.) at 37° C. and 250 rpm.

[0347] In one of the cultivations of each strain initial concentrations of glucose, succinic acid, lactic acid, glycerol, acetic acid, ethanol and isobutanol were analyzed by HPLC as described previously and results are provided in Table 7a and 7b, “n.d.” indicates that the respective compound was not detected. Samples of each of the cultivations were withdrawn at 24 h and 48 h of the process and analyzed accordingly. Results are provided in Tables 9a and 9b. First number in a compound column is the average measured concentration value c(av) from quatriplicate (strain E. coli 3KO adhE::kan+pBCDDB: triplicate) experiments, the second indicates the standard deviation SD found in these experiments.

[0348] Also average optical density ODav from quatriplicate experiments (strain E. coli 3KO adhE::kan+pBCDDB: triplicate) as an indicator for the biomass dry weight concentration was analyzed for the strains not only at process time t=0 h, but also at t=24 h and t=48 h and is provided in Table 8, together with the standard deviation SD.

[0349] Table 10 shows the yields of isobutanol, Y(isobutanol, defined as the absolute difference of isobutanol concentrations measured at the beginning and the end of the 48 h experiment in [g/l], divided by the absolute difference of the glucose concentrations measured in [g/l] at Oh and 48 h of the experiments. Average values from the quatriplicate (strain E. coli 3KO adhE::kan+pBCDDB: triplicate) experiments between 0.31 g/g (E. coli 4KO gnd::kan+pBCDDB) and 0.40 g/g (E. coli 6KO pfkB::kan+pBCDDB) were achieved with the isobutanol producing strains. Maximum stoichiometric yield assuming 100% conversion of glucose through EDP with the given isobutanol pathway is 0.41 g/g. Thus, the isobutanol yields ranged from greater than about 75% of theoretical to over 95% of theoretical. Average standard deviations of the yield values, SD(Y), were calculated from the quatriplicate (strain E. coli 3KO adhE::kan+pBCDDB: triplicate) experiments applying error propagation to the averaged input values (see Table 10).

[0350] Also shown in Table 10 is the average volumetric productivity Qp (48) determined for the different strain cultivations after 48 h from the quatriplicate (strain E. coli 3KO adhE::kan+pBCDDB: triplicate) experiments. Average volumetric productivity was calculated as the absolute difference of the average isobutanol concentrations measured at the beginning and the end of the experiment in [mmol/l], divided by the time of the cultivation, 48 h. Average volumetric productivities were found to be between 0.16 mmol/1 h (E. coli 3KO adhE::kan+pBCDDB) and 0.50 mmol/1 h (E. coli 5KO pfkA::kan+pBCDDB) (see table 10). Average standard deviations of the average volumetric productivity, SD(Qp), were calculated from the quatriplicate (strain E. coli 3KO adhE::kan+pBCDDB: triplicate) experiments applying error propagation to the averaged input values.

TABLE 7a
Initial Product Concentrations

| | | Succinic | Lactic | | Acetic |
|---|---|---|---|---|---|
| | Glucose | acid | acid | Glycerol | acid |
| E. coli strain | [mM] | [mM] | [mM] | [mM] | [mM] |
| BW25113 + | 106.8 | 0.82 | 0.45 | 0.38 | 1.40 |
| pTrc | | | | | |
| 3KO adh::kan + | 106.4 | 0.72 | 0.46 | 0.41 | 1.19 |
| pBCDDB | | | | | |
| 4KO gnd::kan + | 106.5 | 0.73 | 0.46 | 0.42 | 1.27 |
| pBCDDB | | | | | |
| 5KO pfkA::kan + | 106.2 | 0.72 | 0.47 | 0.42 | 1.23 |
| pBCDDB | | | | | |
| 6KO pfkB::kan + | 105.7 | 0.72 | 0.43 | 0.39 | 1.25 |
| pBCDDB | | | | | |
| 7KO fbaA::kan + | 106.3 | 0.71 | 0.43 | 0.40 | 1.35 |
| pBCDDB | | | | | |
| 8KO fbaB::kan + | 106.3 | 0.70 | 0.44 | 0.42 | 1.39 |
| pBCDDB | | | | | |
| 8KO fbaB::kan + | 106.1 | 0.71 | 0.44 | 0.49 | 1.25 |
| pBCDDB + pED | | | | | |

TABLE 7b
Initial Product Concentrations

| | | | Ketoisovaleric | |
|---|---|---|---|---|
| | Ethanol | Pyruvic acid | acid | iso-Butanol |
| E. coli strain | [mM] | [mM] | [mM] | [mM] |
| BW25113 + | 2.54 | 0.25 | n.d. | n.d. |
| pTrc | | | | |
| 3KO adh::kan + | n.d. | 0.10 | n.d. | n.d. |
| pBCDDB | | | | |
| 4KO gnd::kan + | n.d. | 0.10 | n.d. | n.d. |
| pBCDDB | | | | |
| 5KO pfkA::kan + | n.d. | 0.12 | n.d. | n.d. |
| pBCDDB | | | | |
| 6KO pfkB::kan + | n.d. | 0.18 | n.d. | n.d. |
| pBCDDB | | | | |
| 7KO fbaA::kan + | n.d. | 0.20 | n.d. | n.d. |
| pBCDDB | | | | |
| 8KO fbaB::kan + | n.d. | 0.18 | n.d. | n.d. |
| pBCDDB | | | | |
| 8KO fbaB::kan + | n.d. | 0.14 | n.d. | n.d. |
| pBCDDB + pED | | | | |

TABLE 8
OD during the experiments

| | samples t = 0 h | | samples t = 24 h | | samples t = 48 h | |
|---|---|---|---|---|---|---|
| E. coli strain | ODav [ ] | SD [ ] | ODav [ ] | SD [ ] | ODav [ ] | SD [ ] |
| BW25113 + | 0.144 | 0.005 | 3.354 | 0.041 | 3.304 | 0.041 |
| pTrc | | | | | | |
| 3KO adh::kan + | 0.084 | 0.002 | 0.218 | 0.006 | 0.188 | 0.004 |
| pBCDDB | | | | | | |
| 4KO gnd::kan + | 0.088 | 0.007 | 0.374 | 0.008 | 0.312 | 0.008 |
| pBCDDB | | | | | | |
| 5KO pfkA::kan + | 0.090 | 0.004 | 0.563 | 0.032 | 0.612 | 0.050 |
| pBCDDB | | | | | | |
| 6KO pfkB::kan + | 0.099 | 0.001 | 0.543 | 0.023 | 0.703 | 0.030 |
| pBCDDB | | | | | | |
| 7KO fbaA::kan + | 0.099 | 0.002 | 0.510 | 0.011 | 0.657 | 0.018 |
| pBCDDB | | | | | | |
| 8KO fbaB::kan + | 0.104 | 0.002 | 0.562 | 0.013 | 0.799 | 0.009 |
| pBCDDB | | | | | | |
| 8KO fbaB::kan + | 0.093 | 0.002 | 0.345 | 0.021 | 0.511 | 0.044 |
| pBCDDB + pED | | | | | | |

TABLE 9a
Products from Fermentation with Microbial Host Cells

| | | | | | Succinic | | Lactic | | | |
|---|---|---|---|---|---|---|---|---|---|---|
| | | | Glucose | | acid | | acid | | Glycerol | |
| | | | [mM] | | [mM] | | [mM] | | [mM] | |
| Cultures | | Sample | c (av) | SD | c (av) | SD | c (av) | SD | c (av) | SD |
| E. coli | BW25113 + | 24 h | 59.3 | 0.2 | 6.4 | 0.0 | 50.1 | 0.2 | 0.3 | 0.0 |
| | pTrc | | | | | | | | | |
| | | 48 h | 59.3 | 0.2 | 6.4 | 0.0 | 50.1 | 0.3 | 0.4 | 0.1 |
| E. coli | 3KO adh::kan + | 24 h | 98.5 | 0.1 | 1.0 | 0.0 | 0.7 | 0.0 | 0.5 | 0.0 |
| | pBCDDB | | | | | | | | | |
| | | 48 h | 98.2 | 0.2 | 1.2 | 0.0 | 0.7 | 0.0 | 0.5 | 0.0 |
| E. coli | 4KO gnd::kan + | 24 h | 94.6 | 0.5 | 1.8 | 0.0 | 0.8 | 0.0 | 0.4 | 0.0 |
| | pBCDDB | | | | | | | | | |
| | | 48 h | 92.5 | 0.1 | 0.0 | 0.0 | 1.0 | 0.0 | 0.4 | 0.0 |
| E. coli | 5KO pfkA::kan + | 24 h | 94.0 | 0.8 | 1.2 | 0.0 | 0.5 | 0.1 | 0.0 | 0.0 |
| | pBCDDB | | | | | | | | | |
| | | 48 h | 81.0 | 1.7 | 1.4 | 0.1 | 0.7 | 0.0 | 0.0 | 0.0 |
| E. coli | 6KO pfkB::kan + | 24 h | 95.6 | 0.3 | 1.2 | 0.0 | 0.7 | 0.0 | 0.0 | 0.0 |
| | pBCDDB | | | | | | | | | |
| | | 48 h | 84.1 | 0.7 | 1.3 | 0.0 | 0.7 | 0.1 | 0.0 | 0.0 |
| E. coli | 7KO fbaA::kan + | 24 h | 96.2 | 0.2 | 1.2 | 0.1 | 0.7 | 0.0 | 0.0 | 0.0 |
| | pBCDDB | | | | | | | | | |
| | | 48 h | 85.3 | 0.3 | 1.3 | 0.1 | 0.7 | 0.0 | 0.0 | 0.0 |
| E. coli | 8KO fbaB::kan + | 24 h | 95.8 | 0.3 | 1.1 | 0.0 | 0.7 | 0.0 | 0.2 | 0.0 |
| | pBCDDB | | | | | | | | | |
| | | 48 h | 86.1 | 0.1 | 1.3 | 0.0 | 0.6 | 0.0 | 0.0 | 0.0 |
| E. coli | 8KO fbaB::kan + | 24 h | 99.2 | 0.6 | 0.9 | 0.0 | 0.7 | 0.0 | 0.4 | 0.0 |
| | pBCDDB + | | | | | | | | | |
| | pED | | | | | | | | | |
| | | 48 h | 93.2 | 0.8 | 1.0 | 0.0 | 0.7 | 0.0 | 0.3 | 0.0 |

TABLE 9b
Products from Fermentation with Microbial Host Cells

| | | | Acetic | | | | Pyruvic | | Ketoisovaleric | | Iso- | |
|---|---|---|---|---|---|---|---|---|---|---|---|---|
| | | | acid | | Ethanol | | acid | | acid | | Butanol | |
| | | | [mM] | | [mM] | | [mM] | | [mM] | | [mM] | |
| Cultures | | Sample | c (av) | SD | c (av) | SD | c (av) | SD | c (av) | SD | c (av) | SD |
| E. coli | BW25113 + | 24 h | 21.9 | 0.1 | 22.5 | 0.3 | 0.3 | 0.0 | 0.0 | 0.0 | 0.0 | 0.0 |
| | pTrc | | | | | | | | | | | |
| | | 48 h | 21.7 | 0.1 | 22.6 | 0.3 | 0.4 | 0.0 | 0.0 | 0.0 | 0.0 | 0.0 |
| E. coli | 3KO adh::kan + | 24 h | 1.2 | 0.1 | 0.0 | 0.0 | 0.4 | 0.0 | 0.5 | 0.0 | 7.2 | 0.1 |
| | pBCDDB | | | | | | | | | | | |
| | | 48 h | 1.3 | 0.1 | 0.0 | 0.0 | 0.5 | 0.0 | 0.5 | 0.0 | 7.9 | 0.2 |
| E. coli | 4KO gnd::kan + | 24 h | 1.4 | 0.0 | 0.0 | 0.0 | 0.5 | 0.0 | 0.4 | 0.0 | 8.6 | 0.4 |
| | pBCDDB | | | | | | | | | | | |
| | | 48 h | 1.1 | 0.2 | 0.0 | 0.0 | 0.6 | 0.0 | 0.3 | 0.2 | 10.8 | 0.3 |
| E. coli | 5KO pfkA::kan + | 24 h | 1.8 | 0.0 | 0.0 | 0.0 | 0.6 | 0.0 | 0.4 | 0.0 | 11.2 | 0.6 |
| | pBCDDB | | | | | | | | | | | |
| | | 48 h | 2.5 | 0.1 | 0.0 | 0.0 | 0.6 | 0.0 | 0.7 | 0.1 | 24.2 | 1.5 |
| E. coli | 6KO pfkB::kan + | 24 h | 2.3 | 0.0 | 0.0 | 0.0 | 0.3 | 0.0 | 0.4 | 0.0 | 9.9 | 0.5 |
| | pBCDDB | | | | | | | | | | | |
| | | 48 h | 3.3 | 0.1 | 0.0 | 0.0 | 0.4 | 0.0 | 0.9 | 0.0 | 21.1 | 0.8 |
| E. coli | 7KO fbaA::kan + | 24 h | 2.4 | 0.1 | 0.0 | 0.0 | 0.4 | 0.0 | 0.5 | 0.1 | 9.0 | 0.2 |
| | pBCDDB | | | | | | | | | | | |
| | | 48 h | 3.2 | 0.2 | 0.0 | 0.0 | 0.4 | 0.0 | 1.0 | 0.1 | 19.7 | 0.3 |
| E. coli | 8KO fbaB::kan + | 24 h | 2.3 | 0.1 | 0.0 | 0.0 | 0.3 | 0.0 | 0.5 | 0.0 | 9.3 | 0.3 |
| | pBCDDB | | | | | | | | | | | |
| | | 48 h | 3.3 | 0.1 | 0.0 | 0.0 | 0.4 | 0.0 | 0.7 | 0.0 | 19.1 | 0.1 |
| E. coli | 8KO fbaB::kan + | 24 h | 2.3 | 0.0 | 0.0 | 0.0 | 0.5 | 0.0 | 0.5 | 0.0 | 6.3 | 0.4 |
| | pBCDDB + pED | | | | | | | | | | | |
| | | 48 h | 3.2 | 0.1 | 0.0 | 0.0 | 0.4 | 0.1 | 0.7 | 0.1 | 12.3 | 0.7 |

TABLE 10
Yield and Average Volumetric Productivity

| | | Y (iso- | | | |
|---|---|---|---|---|---|
| | | Butanol) | SD (Y) | Qp (48) | SD (Qp) |
| Cultures | | [g/g] | [g/g] | [mmol/l h] | [mmol/l h] |
| E. coli | BW25113 + | 0.00 | 0.00 | 0.00 | 0.00 |
| | pTrc | | | | |
| E. coli | 3KO adh::kan + | 0.39 | 0.00 | 0.16 | 0.00 |
| | pBCDDB | | | | |
| E. coli | 4KO gnd::kan + | 0.31 | 0.01 | 0.23 | 0.01 |
| | pBCDDB | | | | |
| E. coli | 5KO pfkA::kan + | 0.39 | 0.00 | 0.50 | 0.01 |
| | pBCDDB | | | | |
| E. coli | 6KO pfkB::kan + | 0.40 | 0.00 | 0.44 | 0.01 |
| | pBCDDB | | | | |
| E. coli | 7KO fbaA::kan + | 0.39 | 0.01 | 0.41 | 0.00 |
| | pBCDDB | | | | |
| E. coli | 8KO fbaB::kan + | 0.39 | 0.00 | 0.40 | 0.01 |
| | pBCDDB | | | | |
| E. coli | 8KO fbaB::kan + | 0.39 | 0.00 | 0.26 | 0.01 |
| | pBCDDB + pED | | | | |

### Example 17

### Prophetic

### ¹³C Tracer Analysis to Demonstrate Isobutanol Production with a Functional and/or Enhanced ED Pathway in E. coli

[0351] Strains E. coli BW25113+pTrc (E. coli K-12 BW25113+pTrc99a), E. coli 3KO adhE::kan+pBCDDB (E. coli K12 ΔpflB ΔfrdB ΔldhA ΔadhE::kan+pBCDDB), E. coli 4KO gnd::kan+pBCDDB (E. coli K12 ΔpflB ΔfrdB ΔldhA ΔadhE Δgnd::kan+pBCDDB), E. coli 5KO pfkA::kan+pBCDDB (E. coli K12 ΔpflB ΔfrdB ΔldhA ΔadhE Δgnd ΔpfkA::kan+pBCDDB), E. coli 6KO pfkB::kan

[0352] +pBCDDB (E. coli K12 ΔpflB ΔfrdB ΔldhA ΔadhE Δgnd ΔpfkA ΔpfkB::kan+pBCDDB), E. coli 7KO fbaA::kan+pBCDDB (E. coli K12 ΔpflB ΔfrdB ΔldhA ΔadhE Δgnd ΔpfkA ΔpfkB ΔfbaA::kan+pBCDDB), E. coli 8KO fbaB::kan+pBCDDB (E. coli K12 ΔpflB ΔfrdB ΔldhA ΔadhE Δgnd ΔpfkA ΔpfkB ΔfbaA ΔfbaB::kan+pBCDDB) and E. coli 8KO fbaB::kan+pBCDDB+pED (E. coli K12 ΔpflB ΔfrdB ΔldhA ΔadhE Δgnd ΔpfkA ΔpfkB ΔfbaA ΔfbaB::kan+pBCDDB+pCL1925-edp3-edp4) are constructed as described previously and stored as frozen glycerol stock cultures.

[0353] 10 μl of frozen glycerol stocks from strains E. coli BW25113+pTrc, E. coli 3KO adhE::kan+pBCDDB, E. coli 4KO gnd::kan+pBCDDB, E. coli 5KO pfkA::kan+pBCDDB, E. coli 6KO pfkB::kan+pBCDDB, E. coli 7KO fbaA::kan+pBCDDB, E. coli 8KO fbaB::kan+pBCDDB and E. coli 8KO fbaB::kan+pBCDDB+pED are inoculated into 15 ml culture tubes filled with 3.5 ml LB medium and 100 μg/ml carbenicillin. Additionally 50 μg/ml spectinomycin are added to the E. coli 8KO fbaB::kan+pBCDDB+pED culture. The aerobic cultures are incubated over night at 30° C. and 250 rpm in an Innova Laboratory Shaker (New Brunswick Scientific, Edison, N.J.).

[0354] The next day 250 μl of each culture are transferred under anaerobic conditions into 25 ml Balch tubes filled with 12 ml growth medium. Initial optical densities are measured at λ=600 nm. The growth medium consists of LB medium with 100 mM glucose, 0.1 M MOPs buffer at pH=7.0 and 100 μg/ml carbenicillin added. Growth medium of strain E. coli 8KO fbaB::kan+pBCDDB+pED contains in addition 50 μg/ml spectinomycin.

[0355] Carbon naturally occurs in two major stable isotopes, ¹²C and ¹³C, at an abundancy of about 98.9% and 1.1%. The naturally occurring ratio of ¹²C/¹³C is called “natural abundance”. The glucose in the ¹³C tracer experiment consists out of approximately 40% glucose labeled at natural abundance, 40% glucose with a ¹³C atom at the C1 position of the molecule, and 20% of fully labeled ¹³C glucose.

[0356] Each Balch tube is fitted with a butyl rubber septum which allowed periodic gas and liquid sampling via syringe. The stopper is cramped to the tube with a sheet metal with circular opening on top for sampling with a syringe with needle through the rubber septum.

[0357] Samples are withdrawn at 0 h, 24 h and 48 h of the process and analyzed for their concentrations of glucose, succinic acid, lactic acid, glycerol, acetic acid, ethanol and isobutanol by HPLC as described previously. Isobutanol formation is detected. Optical densities at λ=600 nm are determined at 0 h, 24 h and 48 h and biomass growth is determined.

[0358] Samples are spun down with an Eppendorf centrifuge at 14.000 rpm and 2 min, the supernatant is retained and the pellet discarded. For volatile analysis, the supernatant is used directly. For analysis of non-volatile compounds, 400 μL of the supernatant is dried under vacuum in a speedvac at 45° C. Dried material is resuspended in 100 μl of Methoxyamine.HCl in Pyridine (Sigma-Aldrich, St. Louis, Mo.) and 100 μl of N-(tert-butyldimethylsilyl)-N-methyl-trifluoroacetamide (MTBSTFA) (Sigma-Aldrich, St. Louis, Mo.) is added. The mixture is incubated for 60 min at 60° C.

[0359] For analysis of proteinogenic amino acids, cell pellets equivalent to 4-8 mg of dry weight (if necessary, replica experiments can be pooled) are dissolved in 1.5 ml of 6 N HCl and incubated for 24 h at 110° C. in a heating block. The hydrolyzates are dried under vacuum in a speedvac at 45° C. For derivatization, the dried hydrolyzates is resuspended in 100 μl of 2% Methoxyamine.HCl in Pyridine (Sigma-Aldrich, St. Louis, Mo.) and 100 μl of N-(tert-butyldimethylsilyl)-N-methyl-trifluoroacetamide (MTBSTFA) (Sigma-Aldrich, St. Louis, Mo.) was added. The mixture is incubated for 60 min at 60° C., transferred to GC vials and injected into the GC/MS.

[0360] GC/MS analysis is carried out with a HP GC6890 equipped with a MSD5973 detector. In the analysis of TBDMS derivatives, a Supelco Equity-1 column (30 m×0.32 mm×0.25 m) is applied. The injection volume is 1 μL at a carrier gas flow of 2 mL/min helium with a split ratio of 1:20. The initial oven temperature of 150° C. is maintained for 2 min and then raised to 280° C. at 3 C/min. Other settings are 280° C. interface temperature, 200° C. ion source temperature, and electron impact ionization (EI) at 70 eV. Mass spectra are analyzed in the range of 100-660 atom mass units (amu) at a rate of 2.46 scans/sec for a run time of 45.33 min. Mass isotopomer distributions of non-volatile compounds and proteinogenic amino acids are determined.

[0361] Volatile compounds in supernatant are analyzed with a HP-INNOWAX polyethylene glycol column (30 m×0.25 mm×0.25 um). The injection volume is 0.5 μL at a carrier gas flow of 1 mL/min helium with a split ratio of 1:5. The initial oven temperature of 45° C. is maintained for 1 min, raised to 220° C. at a rate of 10° C./min and hold for another 5 min (total run time: 23.50 min). Other settings are 220° C. interface temperature, 250° C. ion source temperature, and electron impact ionization (EI) at 70 eV. Mass spectra are analyzed in the range of 40-350 atom mass units (amu) at a rate of 4.52 scans/sec. Mass isotopomer distributions of volatile compounds are determined.

[0362] Based on the results for the biomass, by-products and mass isotopomers measurements, flux through ED pathway is calculated either by metabolic flux ratio analysis, based on algebraic equations as exemplified in the art (Christensen, Christiansen et al. 2001, Biotechnol Bioeng 74(6): 517-523) or (Nanchen, Fuhrer et al. 2007, Methods Mol Biol 358: 177-197), or with the help of metabolic flux analysis, based on the balancing of mass isotopomers, as described in the art (Dauner, Bailey et al. 2001, Biotechnol Bioeng 76(2): 144-156), (Antoniewicz, Kelleher et al. 2007, Metab Eng 9(1): 68-86) or (Zamboni, Fendt et al. 2009, Nat Protoc 4(6): 878-892). In preferred embodiments, the relative flux through at least one reaction unique to the EDP is at least 1% greater than that in the control host, demonstrating that isobutanol is produced with the help of a functional and/or enhanced ED pathway. In other preferred embodiments, the relative flux through at least one reaction unique to the EDP is at least about 10% 50%, or 90% greater than that in the control host. In other embodiments, the relative flux through at least one reaction unique to the EMP or PPP is at least about 1% less than that in the control host, demonstrating that isobutanol is produced with the help of a functional and/or enhanced ED pathway. In other embodiments, the combined relative flux through the EMP and PPP is at least about 1% less than that in the control host, demonstrating that isobutanol is produced with the help of a functional and/or enhanced ED pathway.

The application's sequence listing, which the Patent Office published only in electronic form, follows.

SEQUENCE LISTING (328 sequences)

SEQ ID NO: 1 - DNA, 1713 bp, Bacillus subtilis
ttgacaaaagcaacaaaagaacaaaaatcccttgtgaaaaacagaggggcggagcttgttgttgattgcttagtggagcaaggtgtcacacatgtatttggcattccaggtgcaaaaattgatgcggtatttgacgctttacaagataaaggacctgaaattatcgttgcccggcacgaacaaaacgcagcattcatggcccaagcagtcggccgtttaactggaaaaccgggagtcgtgttagtcacatcaggaccgggtgcctctaacttggcaacaggcctgctgacagcgaacactgaaggagaccctgtcgttgcgcttgctggaaacgtgatccgtgcagatcgtttaaaacggacacatcaatctttggataatgcggcgctattccagccgattacaaaatacagtgtagaagttcaagatgtaaaaaatataccggaagctgttacaaatgcatttaggatagcgtcagcagggcaggctggggccgcttttgtgagctttccgcaagatgttgtgaatgaagtcacaaatacgaaaaacgtgcgtgctgttgcagcgccaaaactcggtcctgcagcagatgatgcaatcagtgcggccatagcaaaaatccaaacagcaaaacttcctgtcgttttggtcggcatgaaaggcggaagaccggaagcaattaaagcggttcgcaagcttttgaaaaaggttcagcttccatttgttgaaacatatcaagctgccggtaccctttctagagatttagaggatcaatattttggccgtatcggtttgttccgcaaccagcctggcgatttactgctagagcaggcagatgttgttctgacgatcggctatgacccgattgaatatgatccgaaattctggaatatcaatggagaccggacaattatccatttagacgagattatcgctgacattgatcatgcttaccagcctgatcttgaattgatcggtgacattccgtccacgatcaatcatatcgaacacgatgctgtgaaagtggaatttgcagagcgtgagcagaaaatcctttctgatttaaaacaatatatgcatgaaggtgagcaggtgcctgcagattggaaatcagacagagcgcaccctcttgaaatcgttaaagagttgcgtaatgcagtcgatgatcatgttacagtaacttgcgatatcggttcgcacgccatttggatgtcacgttatttccgcagctacgagccgttaacattaatgatcagtaacggtatgcaaacactcggcgttgcgcttccttgggcaatcggcgcttcattggtgaaaccgggagaaaaagtggtttctgtctctggtgacggcggtttcttattctcagcaatggaattagagacagcagttcgactaaaagcaccaattgtacacattgtatggaacgacagcacatatgacatggttgcattccagcaattgaaaaaatataaccgtacatctgcggtcgatttcggaaatatcgatatcgtgaaatatgcggaaagcttcggagcaactggcttgcgcgtagaatcaccagaccagctggcagatgttctgcgtcaaggcatgaacgctgaaggtcctgtcatcatcgatgtcccggttgactacagtgataacattaatttagcaagtgacaagcttccgaaagaattcggggaactcatgaaaacgaaagctctctag

SEQ ID NO: 2 - protein, 570 aa, Bacillus subtilis
MTKATKEQKSLVKNRGAELVVDCLVEQGVTHVFGIPGAKIDAVFDALQDKGPEIIVARHEQNAAFMAQAVGRLTGKPGVVLVTSGPGASNLATGLLTANTEGDPVVALAGNVIRADRLKRTHQSLDNAALFQPITKYSVEVQDVKNIPEAVTNAFRIASAGQAGAAFVSFPQDVVNEVTNTKNVRAVAAPKLGPAADDAISAAIAKIQTAKLPVVLVGMKGGRPEAIKAVRKLLKKVQLPFVETYQAAGTLSRDLEDQYFGRIGLFRNQPGDLLLEQADVVLTIGYDPIEYDPKFWNINGDRTIIHLDEIIADIDHAYQPDLELIGDIPSTINHIEHDAVKVEFAEREQKILSDLKQYMHEGEQVPADWKSDRAHPLEIVKELRNAVDDHVTVTCDIGSHAIWMSRYFRSYEPLTLMISNGMQTLGVALPWAIGASLVKPGEKVVSVSGDGGFLFSAMELETAVRLKAPIVHIVWNDSTYDMVAFQQLKKYNRTSAVDFGNIDIVKYAESFGATGLRVESPDQLADVLRQGMNAEGPVIIDVPVDYSDNINLASDKLPKEFGELMKTKAL

SEQ ID NO: 3 - DNA, 1680 bp, Klebsiella pneumoniae
atggacaaacagtatccggtacgccagtgggcgcacggcgccgatctcgtcgtcagtcagctggaagctcagggagtacgccaggtgttcggcatccccggcgccaaaatcgacaaggtctttgattcactgctggattcctccattcgcattattccggtacgccacgaagccaacgccgcatttatggccgccgccgtcggacgcattaccggcaaagcgggcgtggcgctggtcacctccggtccgggctgttccaacctgatcaccggcatggccaccgcgaacagcgaaggcgacccggtggtggccctgggcggcgcggtaaaacgcgccgataaagcgaagcaggtccaccagagtatggatacggtggcgatgttcagcccggtcaccaaatacgccatcgaggtgacggcgccggatgcgctggcggaagtggtctccaacgccttccgcgccgccgagcagggccggccgggcagcgcgttcgttagcctgccgcaggatgtggtcgatggcccggtcagcggcaaagtgctgccggccagcggggccccgcagatgggcgccgcgccggatgatgccatcgaccaggtggcgaagcttatcgcccaggcgaagaacccgatcttcctgctcggcctgatggccagccagccggaaaacagcaaggcgctgcgccgtttgctggagaccagccatattccagtcaccagcacctatcaggccgccggagcggtgaatcaggataacttctctcgcttcgccggccgggttgggctgtttaacaaccaggccggggaccgtctgctgcagctcgccgacctggtgatctgcatcggctacagcccggtggaatacgaaccggcgatgtggaacagcggcaacgcgacgctggtgcacatcgacgtgctgcccgcctatgaagagcgcaactacaccccggatgtcgagctggtgggcgatatcgccggcactctcaacaagctggcgcaaaatatcgatcatcggctggtgctctccccgcaggcggcggagatcctccgcgaccgccagcaccagcgcgagctgctggaccgccgcggcgcgcagctcaaccagtttgccctgcatcccctgcgcatcgttcgcgccatgcaggatatcgtcaacagcgacgtcacgttgaccgtggacatgggcagcttccatatctggattgcccgctacctgtacacgttccgcgcccgtcaggtgatgatctccaacggccagcagaccatgggcgtcgccctgccctgggctatcggcgcctggctggtcaatcctgagcgcaaagtggtctccgtctccggcgacggcggcttcctgcagtcgagcatggagctggagaccgccgtccgcctgaaagccaacgtgctgcatcttatctgggtcgataacggctacaacatggtcgctatccaggaagagaaaaaatatcagcgcctgtccggcgtcgagtttgggccgatggattttaaagcctatgccgaatccttcggcgcgaaagggtttgccgtggaaagcgccgaggcgctggagccgaccctgcgcgcggcgatggacgtcgacggcccggcggtagtggccatcccggtggattatcgcgataacccgctgctgatgggccagctgcatctgagtcagattctgtaa

SEQ ID NO: 4 - protein, 559 aa, Klebsiella pneumoniae
MDKQYPVRQWAHGADLVVSQLEAQGVRQVFGIPGAKIDKVFDSLLDSSIRIIPVRHEANAAFMAAAVGRITGKAGVALVTSGPGCSNLITGMATANSEGDPVVALGGAVKRADKAKQVHQSMDTVAMFSPVTKYAIEVTAPDALAEVVSNAFRAAEQGRPGSAFVSLPQDVVDGPVSGKVLPASGAPQMGAAPDDAIDQVAKLIAQAKNPIFLLGLMASQPENSKALRRLLETSHIPVTSTYQAAGAVNQDNFSRFAGRVGLFNNQAGDRLLQLADLVICIGYSPVEYEPAMWNSGNATLVHIDVLPAYEERNYTPDVELVGDIAGTLNKLAQNIDHRLVLSPQAAEILRDRQHQRELLDRRGAQLNQFALHPLRIVRAMQDIVNSDVTLTVDMGSFHIWIARYLYTFRARQVMISNGQQTMGVALPWAIGAWLVNPERKVVSVSGDGGFLQSSMELETAVRLKANVLHLIWVDNGYNMVAIQEEKKYQRLSGVEFGPMDFKAYAESFGAKGFAVESAEALEPTLRAAMDVDGPAVVAIPVDYRDNPLLMGQLHLSQIL

SEQ ID NO: 5 - DNA, 1665 bp, Lactobacillus lactis
atgtctgagaaacaatttggggcgaacttggttgtcgatagtttgattaaccataaagtgaagtatgtatttgggattccaggagcaaaaattgaccgggtttttgatttattagaaaatgaagaaggccctcaaatggtcgtgactcgtcatgagcaaggagctgctttcatggctcaagctgtcggtcgtttaactggcgaacctggtgtagtagttgttacgagtgggcctggtgtatcaaaccttgcgactccgcttttgaccgcgacatcagaaggtgatgctattttggctatcggtggacaagttaaacgaagtgaccgtcttaaacgtgcgcaccaatcaatggataatgctggaatgatgcaatcagcaacaaaatattcagcagaagttcttgaccctaatacactttctgaatcaattgccaacgcttatcgtattgcaaaatcaggacatccaggtgcaactttcttatcaatcccccaagatgtaacggatgccgaagtatcaatcaaagccattcaaccactttcagaccctaaaatggggaatgcctctattgatgacattaattatttagcacaagcaattaaaaatgctgtattgccagtaattttggttggagctggtgcttcagatgctaaagtcgcttcatccttgcgtaatctattgactcatgttaatattcctgtcgttgaaacattccaaggtgcaggggttatttcacatgatttagaacatactttttatggacgtatcggtcttttccgcaatcaaccaggcgatatgcttctgaaacgttctgaccttgttattgctgttggttatgacccaattgaatatgaagctcgtaactggaatgcagaaattgatagtcgaattatcgttattgataatgccattgctgaaattgatacttactaccaaccagagcgtgaattaattggtgatatcgcagcaacattggataatcttttaccagctgttcgtggctacaaaattccaaaaggaacaaaagattatctcgatggccttcatgaagttgctgagcaacacgaatttgatactgaaaatactgaagaaggtagaatgcaccctcttgatttggtcagcactttccaagaaatcgtcaaggatgatgaaacagtaaccgttgacgtaggttcactctacatttggatggcacgtcatttcaaatcatacgaaccacgtcatctcctcttctcaaacggaatgcaaacactcggagttgcacttccttgggcaattacagccgcattgttgcgcccaggtaaaaaagtttattcacactctggtgatggaggcttccttttcacagggcaagaattggaaacagctgtacgtttgaatcttccaatcgttcaaattatctggaatgacggccattatgatatggttaaattccaagaagaaatgaaatatggtcgttcagcagccgttgattttggctatgttgattacgtaaaatatgctgaagcaatgagagcaaaaggttaccgtgcacacagcaaagaagaacttgctgaaattctcaaatcaatcccagatactactggaccggtggtaattgacgttcctttggactattctgataacattaaattagcagaaaaattattgcctgaagagttttattga

SEQ ID NO: 6 - protein, 554 aa, Lactobacillus lactis
MSEKQFGANLVVDSLINHKVKYVFGIPGAKIDRVFDLLENEEGPQMVVTRHEQGAAFMAQAVGRLTGEPGVVVVTSGPGVSNLATPLLTATSEGDAILAIGGQVKRSDRLKRAHQSMDNAGMMQSATKYSAEVLDPNTLSESIANAYRIAKSGHPGATFLSIPQDVTDAEVSIKAIQPLSDPKMGNASIDDINYLAQAIKNAVLPVILVGAGASDAKVASSLRNLLTHVNIPVVETFQGAGVISHDLEHTFYGRIGLFRNQPGDMLLKRSDLVIAVGYDPIEYEARNWNAEIDSRIIVIDNAIAEIDTYYQPERELIGDIAATLDNLLPAVRGYKIPKGTKDYLDGLHEVAEQHEFDTENTEEGRMHPLDLVSTFQEIVKDDETVTVDVGSLYIWMARHFKSYEPRHLLFSNGMQTLGVALPWAITAALLRPGKKVYSHSGDGGFLFTGQELETAVRLNLPIVQIIWNDGHYDMVKFQEEMKYGRSAAVDFGYVDYVKYAEAMRAKGYRAHSKEELAEILKSIPDTTGPVVIDVPLDYSDNIKLAEKLLPEEFY

SEQ ID NO: 7 - DNA, 1476 bp, Escherichia coli
atggctaactacttcaatacactgaatctgcgccagcagctggcacagctgggcaaatgtcgctttatgggccgcgatgaattcgccgatggcgcgagctaccttcagggtaaaaaagtagtcatcgtcggctgtggcgcacagggtctgaaccagggcctgaacatgcgtgattctggtctcgatatctcctacgctctgcgtaaagaagcgattgccgagaagcgcgcgtcctggcgtaaagcgaccgaaaatggttttaaagtgggtacttacgaagaactgatcccacaggcggatctggtgattaacctgacgccggacaagcagcactctgatgtagtgcgcaccgtacagccactgatgaaagacggcgcggcgctgggctactcgcacggtttcaacatcgtcgaagtgggcgagcagatccgtaaagatatcaccgtagtgatggttgcgccgaaatgcccaggcaccgaagtgcgtgaagagtacaaacgtgggttcggcgtaccgacgctgattgccgttcacccggaaaacgatccgaaaggcgaaggcatggcgattgccaaagcctgggcggctgcaaccggtggtcaccgtgcgggtgtgctggaatcgtccttcgttgcggaagtgaaatctgacctgatgggcgagcaaaccatcctgtgcggtatgttgcaggctggctctctgctgtgcttcgacaagctggtggaagaaggtaccgatccagcatacgcagaaaaactgattcagttcggttgggaaaccatcaccgaagcactgaaacagggcggcatcaccctgatgatggaccgtctctctaacccggcgaaactgcgtgcttatgcgctttctgaacagctgaaagagatcatggcacccctgttccagaaacatatggacgacatcatctccggcgaattctcttccggtatgatggcggactgggccaacgatgataagaaactgctgacctggcgtgaagagaccggcaaaaccgcgtttgaaaccgcgccgcagtatgaaggcaaaatcggcgagcaggagtacttcgataaaggcgtactgatgattgcgatggtgaaagcgggcgttgaactggcgttcgaaaccatggtcgattccggcatcattgaagagtctgcatattatgaatcactgcacgagctgccgctgattgccaacaccatcgcccgtaagcgtctgtacgaaatgaacgtggttatctctgataccgctgagtacggtaactatctgttctcttacgcttgtgtgccgttgctgaaaccgtttatggcagagctgcaaccgggcgacctgggtaaagctattccggaaggcgcggtagataacgggcaactgcgtgatgtgaacgaagcgattcgcagccatgcgattgagcaggtaggtaagaaactgcgcggctatatgacagatatgaaacgtattgctgttgcgggttaa

SEQ ID NO: 8 - protein, 491 aa, Escherichia coli
MANYFNTLNLRQQLAQLGKCRFMGRDEFADGASYLQGKKVVIVGCGAQGLNQGLNMRDSGLDISYALRKEAIAEKRASWRKATENGFKVGTYEELIPQADLVINLTPDKQHSDVVRTVQPLMKDGAALGYSHGFNIVEVGEQIRKDITVVMVAPKCPGTEVREEYKRGFGVPTLIAVHPENDPKGEGMAIAKAWAAATGGHRAGVLESSFVAEVKSDLMGEQTILCGMLQAGSLLCFDKLVEEGTDPAYAEKLIQFGWETITEALKQGGITLMMDRLSNPAKLRAYALSEQLKEIMAPLFQKHMDDIISGEFSSGMMADWANDDKKLLTWREETGKTAFETAPQYEGKIGEQEYFDKGVLMIAMVKAGVELAFETMVDSGIIEESAYYESLHELPLIANTIARKRLYEMNVVISDTAEYGNYLFSYACVPLLKPFMAELQPGDLGKAIPEGAVDNGQLRDVNEAIRSHAIEQVGKKLRGYMTDMKRIAVAG

SEQ ID NO: 9 - DNA, 1188 bp, Saccharomyces cerevisiae
atgttgagaactcaagccgccagattgatctgcaactcccgtgtcatcactgctaagagaacctttgctttggccacccgtgctgctgcttacagcagaccagctgcccgtttcgttaagccaatgatcactacccgtggtttgaagcaaatcaacttcggtggtactgttgaaaccgtctacgaaagagctgactggccaagagaaaagttgttggactacttcaagaacgacacttttgctttgatcggttacggttcccaaggttacggtcaaggtttgaacttgagagacaacggtttgaacgttatcattggtgtccgtaaagatggtgcttcttggaaggctgccatcgaagacggttgggttccaggcaagaacttgttcactgttgaagatgctatcaagagaggtagttacgttatgaacttgttgtccgatgccgctcaatcagaaacctggcctgctatcaagccattgttgaccaagggtaagactttgtacttctcccacggtttctccccagtcttcaaggacttgactcacgttgaaccaccaaaggacttagatgttatcttggttgctccaaagggttccggtagaactgtcagatctttgttcaaggaaggtcgtggtattaactcttcttacgccgtctggaacgatgtcaccggtaaggctcacgaaaaggcccaagctttggccgttgccattggttccggttacgtttaccaaaccactttcgaaagagaagtcaactctgacttgtacggtgaaagaggttgtttaatgggtggtatccacggtatgttcttggctcaatacgacgtcttgagagaaaacggtcactccccatctgaagctttcaacgaaaccgtcgaagaagctacccaatctctatacccattgatcggtaagtacggtatggattacatgtacgatgcttgttccaccaccgccagaagaggtgctttggactggtacccaatcttcaagaatgctttgaagcctgttttccaagacttgtacgaatctaccaagaacggtaccgaaaccaagagatctttggaattcaactctcaacctgactacagagaaaagctagaaaaggaattagacaccatcagaaacatggaaatctggaaggttggtaaggaagtcagaaagttgagaccagaaaaccaataa

SEQ ID NO: 10 - protein, 395 aa, Saccharomyces cerevisiae
MLRTQAARLICNSRVITAKRTFALATRAAAYSRPAARFVKPMITTRGLKQINFGGTVETVYERADWPREKLLDYFKNDTFALIGYGSQGYGQGLNLRDNGLNVIIGVRKDGASWKAAIEDGWVPGKNLFTVEDAIKRGSYVMNLLSDAAQSETWPAIKPLLTKGKTLYFSHGFSPVFKDLTHVEPPKDLDVILVAPKGSGRTVRSLFKEGRGINSSYAVWNDVTGKAHEKAQALAVAIGSGYVYQTTFEREVNSDLYGERGCLMGGIHGMFLAQYDVLRENGHSPSEAFNETVEEATQSLYPLIGKYGMDYMYDACSTTARRGALDWYPIFKNALKPVFQDLYESTKNGTETKRSLEFNSQPDYREKLEKELDTIRNMEIWKVGKEVRKLRPENQ

SEQ ID NO: 11 - DNA, 993 bp, Methanococcus maripaludis
atgaaggtattctatgactcagattttaaattagatgctttaaaagaaaaaacaattgcagtaatcggttatggaagtcaaggtagggcacagtccttaaacatgaaagacagcggattaaacgttgttgttggtttaagaaaaaacggtgcttcatggaacaacgctaaagcagacggtcacaatgtaatgaccattgaagaagctgctgaaaaagcggacatcatccacatcttaatacctgatgaattacaggcagaagtttatgaaagccagataaaaccatacctaaaagaaggaaaaacactaagcttttcacatggttttaacatccactatggattcattgttccaccaaaaggagttaacgtggttttagttgctccaaaatcacctggaaaaatggttagaagaacatacgaagaaggtttcggtgttccaggtttaatctgtattgaaattgatgcaacaaacaacgcatttgatattgtttcagcaatggcaaaaggaatcggtttatcaagagctggagttatccagacaactttcaaagaagaaacagaaactgaccttttcggtgaacaagctgttttatgcggtggagttaccgaattaatcaaggcaggatttgaaacactcgttgaagcaggatacgcaccagaaatggcatactttgaaacctgccacgaattgaaattaatcgttgacttaatctaccaaaaaggattcaaaaacatgtggaacgatgtaagtaacactgcagaatacggcggacttacaagaagaagcagaatcgttacagctgattcaaaagctgcaatgaaagaaatcttaagagaaatccaagatggaagattcacaaaagaattccttctcgaaaaacaggtaagctatgctcatttaaaatcaatgagaagactcgaaggagacttacaaatcgaagaagtcggcgcaaaattaagaaaaatgtgcggtcttgaaaaagaagaataa

SEQ ID NO: 12 - protein, 330 aa, Methanococcus maripaludis
MKVFYDSDFKLDALKEKTIAVIGYGSQGRAQSLNMKDSGLNVVVGLRKNGASWNNAKADGHNVMTIEEAAEKADIIHILIPDELQAEVYESQIKPYLKEGKTLSFSHGFNIHYGFIVPPKGVNVVLVAPKSPGKMVRRTYEEGFGVPGLICIEIDATNNAFDIVSAMAKGIGLSRAGVIQTTFKEETETDLFGEQAVLCGGVTELIKAGFETLVEAGYAPEMAYFETCHELKLIVDLIYQKGFKNMWNDVSNTAEYGGLTRRSRIVTADSKAAMKEILREIQDGRFTKEFLLEKQVSYAHLKSMRRLEGDLQIEEVGAKLRKMCGLEKEE

SEQ ID NO: 13 - DNA, 1029 bp, Bacillus subtilis
atggtaaaagtatattataacggtgatatcaaagagaacgtattggctggaaaaacagtagcggttatcgggtacggttcgcaaggccacgcacatgccctgaaccttaaagaaagcggagtagacgtgatcgtcggtgttagacaaggaaaatctttcactcaagcccaagaagacggacataaagtattttcagtaaaagaagcggcagcccaagccgaaatcatcatggttctgcttccggatgagcagcagcaaaaagtatacgaagctgaaatcaaagatgaattgacagcaggaaaatcattagtattcgctcatggatttaacgtgcatttccatcaaattgttcctccggcggatgtagatgtattcttagtggcccctaaaggcccgggacacttggtaagaagaacatatgagcaaggagctggcgtacctgcattgttcgcaatctatcaagatgtgactggagaagcaagagacaaagccctcgcttatgctaaaggaatcggcggcgcaagagcgggcgtattagaaacgacatttaaagaagaaacagaaacagatttgttcggtgagcaagcagttctttgcggcggattaagcgcgcttgtcaaagccggatttgaaaccttaactgaagcaggttatcagcctgaacttgcatacttcgagtgtcttcatgagctgaaattaatcgtagaccttatgtacgaagaaggacttgcaggaatgagatattcaatctctgacacagcacagtggggagatttcgtatcaggccctcgcgttgtggacgccaaagtaaaagaatctatgaaagaagtattaaaagatatccaaaacggtacattcgcaaaagagtggatcgtcgaaaaccaagtaaaccgtcctcgtttcaacgctatcaatgcaagcgagaacgaacatcaaatcgaagtagtgggaagaaagcttcgtgaaatgatgccgtttgtgaaacaaggcaagaagaaggaagcggtggtctccgttgcgcaaaattaa

SEQ ID NO: 14 - protein, 342 aa, Bacillus subtilis
MVKVYYNGDIKENVLAGKTVAVIGYGSQGHAHALNLKESGVDVIVGVRQGKSFTQAQEDGHKVFSVKEAAAQAEIIMVLLPDEQQQKVYEAEIKDELTAGKSLVFAHGFNVHFHQIVPPADVDVFLVAPKGPGHLVRRTYEQGAGVPALFAIYQDVTGEARDKALAYAKGIGGARAGVLETTFKEETETDLFGEQAVLCGGLSALVKAGFETLTEAGYQPELAYFECLHELKLIVDLMYEEGLAGMRYSISDTAQWGDFVSGPRVVDAKVKESMKEVLKDIQNGTFAKEWIVENQVNRPRFNAINASENEHQIEVVGRKLREMMPFVKQGKKKEAVVSVAQN

SEQ ID NO: 15 - DNA, 1851 bp, Escherichia coli
atgcctaagtaccgttccgccaccaccactcatggtcgtaatatggcgggtgctcgtgcgctgtggcgcgccaccggaatgaccgacgccgatttcggtaagccgattatcgcggttgtgaactcgttcacccaatttgtaccgggtcacgtccatctgcgcgatctcggtaaactggtcgccgaacaaattgaagcggctggcggcgttgccaaagagttcaacaccattgcggtggatgatgggattgccatgggccacggggggatgctttattcactgccatctcgcgaactgatcgctgattccgttgagtatatggtcaacgcccactgcgccgacgccatggtctgcatctctaactgcgacaaaatcaccccggggatgctgatggcttccctgcgcctgaatattccggtgatctttgtttccggcggcccgatggaggccgggaaaaccaaactttccgatcagatcatcaagctcgatctggttgatgcgatgatccagggcgcagacccgaaagtatctgactcccagagcgatcaggttgaacgttccgcgtgtccgacctgcggttcctgctccgggatgtttaccgctaactcaatgaactgcctgaccgaagcgctgggcctgtcgcagccgggcaacggctcgctgctggcaacccacgccgaccgtaagcagctgttccttaatgctggtaaacgcattgttgaattgaccaaacgttattacgagcaaaacgacgaaagtgcactgccgcgtaatatcgccagtaaggcggcgtttgaaaacgccatgacgctggatatcgcgatgggtggatcgactaacaccgtacttcacctgctggcggcggcgcaggaagcggaaatcgacttcaccatgagtgatatcgataagctttcccgcaaggttccacagctgtgtaaagttgcgccgagcacccagaaataccatatggaagatgttcaccgtgctggtggtgttatcggtattctcggcgaactggatcgcgcggggttactgaaccgtgatgtgaaaaacgtacttggcctgacgttgccgcaaacgctggaacaatacgacgttatgctgacccaggatgacgcggtaaaaaatatgttccgcgcaggtcctgcaggcattcgtaccacacaggcattctcgcaagattgccgttgggatacgctggacgacgatcgcgccaatggctgtatccgctcgctggaacacgcctacagcaaagacggcggcctggcggtgctctacggtaactttgcggaaaacggctgcatcgtgaaaacggcaggcgtcgatgacagcatcctcaaattcaccggcccggcgaaagtgtacgaaagccaggacgatgcggtagaagcgattctcggcggtaaagttgtcgccggagatgtggtagtaattcgctatgaaggcccgaaaggcggtccggggatgcaggaaatgctctacccaaccagcttcctgaaatcaatgggtctcggcaaagcctgtgcgctgatcaccgacggtcgtttctctggtggcacctctggtctttccatcggccacgtctcaccggaagcggcaagcggcggcagcattggcctgattgaagatggtgacctgatcgctatcgacatcccgaaccgtggcattcagttacaggtaagcgatgccgaactggcggcgcgtcgtgaagcgcaggacgctcgaggtgacaaagcctggacgccgaaaaatcgtgaacgtcaggtctcctttgccctgcgtgcttatgccagcctggcaaccagcgccgacaaaggcgcggtgcgcgataaatcgaaactggggggttaa

SEQ ID NO: 16 - protein, 616 aa, Escherichia coli
MPKYRSATTTHGRNMAGARALWRATGMTDADFGKPIIAVVNSFTQFVPGHVHLRDLGKLVAEQIEAAGGVAKEFNTIAVDDGIAMGHGGMLYSLPSRELIADSVEYMVNAHCADAMVCISNCDKITPGMLMASLRLNIPVIFVSGGPMEAGKTKLSDQIIKLDLVDAMIQGADPKVSDSQSDQVERSACPTCGSCSGMFTANSMNCLTEALGLSQPGNGSLLATHADRKQLFLNAGKRIVELTKRYYEQNDESALPRNIASKAAFENAMTLDIAMGGSTNTVLHLLAAAQEAEIDFTMSDIDKLSRKVPQLCKVAPSTQKYHMEDVHRAGGVIGILGELDRAGLLNRDVKNVLGLTLPQTLEQYDVMLTQDDAVKNMFRAGPAGIRTTQAFSQDCRWDTLDDDRANGCIRSLEHAYSKDGGLAVLYGNFAENGCIVKTAGVDDSILKFTGPAKVYESQDDAVEAILGGKVVAGDVVVIRYEGPKGGPGMQEMLYPTSFLKSMGLGKACALITDGRFSGGTSGLSIGHVSPEAASGGSIGLIEDGDLIAIDIPNRGIQLQVSDAELAARREAQDARGDKAWTPKNRERQVSFALRAYASLATSADKGAVRDKSKLGG

SEQ ID NO: 17 - DNA, 1758 bp, Saccharomyces cerevisiae
atgggcttgttaacgaaagttgctacatctagacaattctctacaacgagatgcgttgcaaagaagctcaacaagtactcgtatatcatcactgaacctaagggccaaggtgcgtcccaggccatgctttatgccaccggtttcaagaaggaagatttcaagaagcctcaagtcggggttggttcctgttggtggtccggtaacccatgtaacatgcatctattggacttgaataacagatgttctcaatccattgaaaaagcgggtttgaaagctatgcagttcaacaccatcggtgtttcagacggtatctctatgggtactaaaggtatgagatactcgttacaaagtagagaaatcattgcagactcctttgaaaccatcatgatggcacaacactacgatgctaacatcgccatcccatcatgtgacaaaaacatgcccggtgtcatgatggccatgggtagacataacagaccttccatcatggtatatggtggtactatcttgcccggtcatccaacatgtggttcttcgaagatctctaaaaacatcgatatcgtctctgcgttccaatcctacggtgaatatatttccaagcaattcactgaagaagaaagagaagatgttgtggaacatgcatgcccaggtcctggttcttgtggtggtatgtatactgccaacacaatggcttctgccgctgaagtgctaggtttgaccattccaaactcctcttccttcccagccgtttccaaggagaagttagctgagtgtgacaacattggtgaatacatcaagaagacaatggaattgggtattttacctcgtgatatcctcacaaaagaggcttttgaaaacgccattacttatgtcgttgcaaccggtgggtccactaatgctgttttgcatttggtggctgttgctcactctgcgggtgtcaagttgtcaccagatgatttccaaagaatcagtgatactacaccattgatcggtgacttcaaaccttctggtaaatacgtcatggccgatttgattaacgttggtggtacccaatctgtgattaagtatctatatgaaaacaacatgttgcacggtaacacaatgactgttaccggtgacactttggcagaacgtgcaaagaaagcaccaagcctacctgaaggacaagagattattaagccactctcccacccaatcaaggccaacggtcacttgcaaattctgtacggttcattggcaccaggtggagctgtgggtaaaattaccggtaaggaaggtacttacttcaagggtagagcacgtgtgttcgaagaggaaggtgcctttattgaagccttggaaagaggtgaaatcaagaagggtgaaaaaaccgttgttgttatcagatatgaaggtccaagaggtgcaccaggtatgcctgaaatgctaaagccttcctctgctctgatgggttacggtttgggtaaagatgttgcattgttgactgatggtagattctctggtggttctcacgggttcttaatcggccacattgttcccgaagccgctgaaggtggtcctatcgggttggtcagagacggcgatgagattatcattgatgctgataataacaagattgacctattagtctctgataaggaaatggctcaacgtaaacaaagttgggttgcacctccacctcgttacacaagaggtactctatccaagtatgctaagttggtttccaacgcttccaacggttgtgttttagatgcttga

SEQ ID NO: 18 - protein, 585 aa, Saccharomyces cerevisiae
MGLLTKVATSRQFSTTRCVAKKLNKYSYIITEPKGQGASQAMLYATGFKKEDFKKPQVGVGSCWWSGNPCNMHLLDLNNRCSQSIEKAGLKAMQFNTIGVSDGISMGTKGMRYSLQSREIIADSFETIMMAQHYDANIAIPSCDKNMPGVMMAMGRHNRPSIMVYGGTILPGHPTCGSSKISKNIDIVSAFQSYGEYISKQFTEEEREDVVEHACPGPGSCGGMYTANTMASAAEVLGLTIPNSSSFPAVSKEKLAECDNIGEYIKKTMELGILPRDILTKEAFENAITYVVATGGSTNAVLHLVAVAHSAGVKLSPDDFQRISDTTPLIGDFKPSGKYVMADLINVGGTQSVIKYLYENNMLHGNTMTVTGDTLAERAKKAPSLPEGQEIIKPLSHPIKANGHLQILYGSLAPGGAVGKITGKEGTYFKGRARVFEEEGAFIEALERGEIKKGEKTVVVIRYEGPRGAPGMPEMLKPSSALMGYGLGKDVALLTDGRFSGGSHGFLIGHIVPEAAEGGPIGLVRDGDEIIIDADNNKIDLLVSDKEMAQRKQSWVAPPPRYTRGTLSKYAKLVSNASNGCVLDA

SEQ ID NO: 19 - DNA, 1653 bp, Methanococcus maripaludis
atgataagtgataacgtcaaaaagggagttataagaactccaaaccgagctcttttaaaggcttgcggatatacagacgaagacatggaaaaaccatttattggaattgtaaacagctttacagaagttgttcccggccacattcacttaagaacattatcagaagcggctaaacatggtgtttatgcaaacggtggaacaccatttgaatttaataccattggaatttgcgacggtattgcaatgggccacgaaggtatgaaatactctttaccttcaagagaaattattgcagacgctgttgaatcaatggcaagagcacatggatttgatggtcttgttttaattcctacgtgtgataaaatcgttcctggaatgataatgggtgctttaagactaaacattccatttattgtagttactggaggaccaatgcttcccggagaattccaaggtaaaaaatacgaacttatcagcctttttgaaggtgtcggagaataccaagttggaaaaattactgaagaagagttaaagtgcattgaagactgtgcatgttcaggtgctggaagttgtgcagggctttacactgcaaacagtatggcctgccttacagaagctttgggactctctcttccaatgtgtgcaacaacgcatgcagttgatgcccaaaaagttaggcttgctaaaaaaagtggctcaaaaattgttgatatggtaaaagaagacctaaaaccaacagacatattaacaaaagaagcttttgaaaatgctattttagttgaccttgcacttggtggatcaacaaacacaacattacacattcctgcaattgcaaatgaaattgaaaataaattcataactctcgatgactttgacaggttaagcgatgaagttccacacattgcatcaatcaaaccaggtggagaacactacatgattgatttacacaatgctggaggtattcctgcggtattgaacgttttaaaagaaaaaattagagatacaaaaacagttgatggaagaagcattttggaaatcgcagaatctgttaaatacataaattacgacgttataagaaaagtggaagctccggttcacgaaactgctggtttaagggttttaaagggaaatcttgctccaaacggttgcgttgtaaaaatcggtgcagtacatccgaaaatgtacaaacacgatggacctgcaaaagtttacaattccgaagatgaagcaatttctgcgatacttggcggaaaaattgtagaaggggacgttatagtaatcagatacgaaggaccatcaggaggccctggaatgagagaaatgctctccccaacttcagcaatctgtggaatgggtcttgatgacagcgttgcattgattactgatggaagattcagtggtggaagtaggggcccatgtatcggacacgtttctccagaagctgcagctggcggagtaattgctgcaattgaaaacggggatatcatcaaaatcgacatgattgaaaaagaaataaatgttgatttagatgaatcagtcattaaagaaagactctcaaaactgggagaatttgagcctaaaatcaaaaaaggctatttatcaagatactcaaaacttgtctcatctgctgacgaaggggcagttttaaaataa

SEQ ID NO: 20 - protein, 550 aa, Methanococcus maripaludis
MISDNVKKGVIRTPNRALLKACGYTDEDMEKPFIGIVNSFTEVVPGHIHLRTLSEAAKHGVYANGGTPFEFNTIGICDGIAMGHEGMKYSLPSREIIADAVESMARAHGFDGLVLIPTCDKIVPGMIMGALRLNIPFIVVTGGPMLPGEFQGKKYELISLFEGVGEYQVGKITEEELKCIEDCACSGAGSCAGLYTANSMACLTEALGLSLPMCATTHAVDAQKVRLAKKSGSKIVDMVKEDLKPTDILTKEAFENAILVDLALGGSTNTTLHIPAIANEIENKFITLDDFDRLSDEVPHIASIKPGGEHYMIDLHNAGGIPAVLNVLKEKIRDTKTVDGRSILEIAESVKYINYDVIRKVEAPVHETAGLRVLKGNLAPNGCVVKIGAVHPKMYKHDGPAKVYNSEDEAISAILGGKIVEGDVIVIRYEGPSGGPGMREMLSPTSAICGMGLDDSVALITDGRFSGGSRGPCIGHVSPEAAAGGVIAAIENGDIIKIDMIEKEINVDLDESVIKERLSKLGEFEPKIKKGYLSRYSKLVSSADEGAVLK

SEQ ID NO: 21 - DNA, 1677 bp, Bacillus subtilis
atggcagaattacgcagtaatatgatcacacaaggaatcgatagagctccgcaccgcagtttgcttcgtgcagcaggggtaaaagaagaggatttcggcaagccgtttattgcggtgtgtaattcatacattgatatcgttcccggtcatgttcacttgcaggagtttgggaaaatcgtaaaagaagcaatcagagaagcagggggcgttccgtttgaatttaataccattggggtagatgatggcatcgcaatggggcatatcggtatgagatattcgctgccaagccgtgaaattatcgcagactctgtggaaacggttgtatccgcacactggtttgacggaatggtctgtattccgaactgcgacaaaatcacaccgggaatgcttatggcggcaatgcgcatcaacattccgacgatttttgtcagcggcggaccgatggcggcaggaagaacaagtgacgggcgaaaaatctccctttcctcagtattcgaaggggtaggcgcctaccaagcagggaaaatcaacgaaaacgagcttcaagaactagagcagttcggatgcccaacgtgcgggtcttgctcaggcatgtttacggcgaactcaatgaactgtctgtcagaagcacttggtcttgctttgccgggtaatggaaccattctggcaacatctccggaacgcaaagagtttgtgagaaaatcggctgcgcaattaatggaaacgattcgcaaagatatcaaaccgcgtgatattgttacagtaaaagcgattgataacgcgtttgcactcgatatggcgctcggaggttctacaaataccgttcttcatacccttgcccttgcaaacgaagccggcgttgaatactctttagaacgcattaacgaagtcgctgagcgcgtgccgcacttggctaagctggcgcctgcatcggatgtgtttattgaagatcttcacgaagcgggcggcgtttcagcggctctgaatgagctttcgaagaaagaaggagcgcttcatttagatgcgctgactgttacaggaaaaactcttggagaaaccattgccggacatgaagtaaaggattatgacgtcattcacccgctggatcaaccattcactgaaaagggaggccttgctgttttattcggtaatctagctccggacggcgctatcattaaaacaggcggcgtacagaatgggattacaagacacgaagggccggctgtcgtattcgattctcaggacgaggcgcttgacggcattatcaaccgaaaagtaaaagaaggcgacgttgtcatcatcagatacgaagggccaaaaggcggacctggcatgccggaaatgctggcgccaacatcccaaatcgttggaatgggactcgggccaaaagtggcattgattacggacggacgtttttccggagcctcccgtggcctctcaatcggccacgtatcacctgaggccgctgagggcgggccgcttgcctttgttgaaaacggagaccatattatcgttgatattgaaaaacgcatcttggatgtacaagtgccagaagaagagtgggaaaaacgaaaagcgaactggaaaggttttgaaccgaaagtgaaaaccggctacctggcacgttattctaaacttgtgacaagtgccaacaccggcggtattatgaaaatctag

SEQ ID NO: 22 - protein, 558 aa, Bacillus subtilis
MAELRSNMITQGIDRAPHRSLLRAAGVKEEDFGKPFIAVCNSYIDIVPGHVHLQEFGKIVKEAIREAGGVPFEFNTIGVDDGIAMGHIGMRYSLPSREIIADSVETVVSAHWFDGMVCIPNCDKITPGMLMAAMRINIPTIFVSGGPMAAGRTSDGRKISLSSVFEGVGAYQAGKINENELQELEQFGCPTCGSCSGMFTANSMNCLSEALGLALPGNGTILATSPERKEFVRKSAAQLMETIRKDIKPRDIVTVKAIDNAFALDMALGGSTNTVLHTLALANEAGVEYSLERINEVAERVPHLAKLAPASDVFIEDLHEAGGVSAALNELSKKEGALHLDALTVTGKTLGETIAGHEVKDYDVIHPLDQPFTEKGGLAVLFGNLAPDGAIIKTGGVQNGITRHEGPAVVFDSQDEALDGIINRKVKEGDVVIIRYEGPKGGPGMPEMLAPTSQIVGMGLGPKVALITDGRFSGASRGLSIGHVSPEAAEGGPLAFVENGDHIIVDIEKRILDVQVPEEEWEKRKANWKGFEPKVKTGYLARYSKLVTSANTGGIMKI

SEQ ID NO: 23 - DNA, 1644 bp, Lactococcus lactis
atgtatacagtaggagattacctgttagaccgattacacgagttgggaattgaagaaatttttggagttcctggtgactataacttacaatttttagatcaaattatttcacgcgaagatatgaaatggattggaaatgctaatgaattaaatgcttcttatatggctgatggttatgctcgtactaaaaaagctgccgcatttctcaccacatttggagtcggcgaattgagtgcgatcaatggactggcaggaagttatgccgaaaatttaccagtagtagaaattgttggttcaccaacttcaaaagtacaaaatgacggaaaatttgtccatcatacactagcagatggtgattttaaacactttatgaagatgcatgaacctgttacagcagcgcggactttactgacagcagaaaatgccacatatgaaattgaccgagtactttctcaattactaaaagaaagaaaaccagtctatattaacttaccagtcgatgttgctgcagcaaaagcagagaagcctgcattatctttagaaaaagaaagctctacaacaaatacaactgaacaagtgattttgagtaagattgaagaaagtttgaaaaatgcccaaaaaccagtagtgattgcaggacacgaagtaattagttttggtttagaaaaaacggtaactcagtttgtttcagaaacaaaactaccgattacgacactaaattttggtaaaagtgctgttgatgaatctttgccctcatttttaggaatatataacgggaaactttcagaaatcagtcttaaaaattttgtggagtccgcagactttatcctaatgcttggagtgaagcttacggactcctcaacaggtgcattcacacatcatttagatgaaaataaaatgatttcactaaacatagatgaaggaataattttcaataaagtggtagaagattttgattttagagcagtggtttcttctttatcagaattaaaaggaatagaatatgaaggacaatatattgataagcaatatgaagaatttattccatcaagtgctcccttatcacaagaccgtctatggcaggcagttgaaagtttgactcaaagcaatgaaacaatcgttgctgaacaaggaacctcattttttggagcttcaacaattttcttaaaatcaaatagtcgttttattggacaacctttatggggttctattggatatacttttccagcggctttaggaagccaaattgcggataaagagagcagacaccttttatttattggtgatggttcacttcaacttaccgtacaagaattaggactatcaatcagagaaaaactcaatccaatttgttttatcataaataatgatggttatacagttgaaagagaaatccacggacctactcaaagttataacgacattccaatgtggaattactcgaaattaccagaaacatttggagcaacagaagatcgtgtagtatcaaaaattgttagaacagagaatgaatttgtgtctgtcatgaaagaagcccaagcagatgtcaatagaatgtattggatagaactagttttggaaaaagaagatgcgccaaaattactgaaaaaaatgggtaaattatttgctgagcaaaataaatag

SEQ ID NO: 24 - protein, 547 aa, Lactococcus lactis
MYTVGDYLLDRLHELGIEEIFGVPGDYNLQFLDQIISREDMKWIGNANELNASYMADGYARTKKAAAFLTTFGVGELSAINGLAGSYAENLPVVEIVGSPTSKVQNDGKFVHHTLADGDFKHFMKMHEPVTAARTLLTAENATYEIDRVLSQLLKERKPVYINLPVDVAAAKAEKPALSLEKESSTTNTTEQVILSKIEESLKNAQKPVVIAGHEVISFGLEKTVTQFVSETKLPITTLNFGKSAVDESLPSFLGIYNGKLSEISLKNFVESADFILMLGVKLTDSSTGAFTHHLDENKMISLNIDEGIIFNKVVEDFDFRAVVSSLSELKGIEYEGQYIDKQYEEFIPSSAPLSQDRLWQAVESLTQSNETIVAEQGTSFFGASTIFLKSNSRFIGQPLWGSIGYTFPAALGSQIADKESRHLLFIGDGSLQLTVQELGLSIREKLNPICFIINNDGYTVEREIHGPTQSYNDIPMWNYSKLPETFGATEDRVVSKIVRTENEFVSVMKEAQADVNRMYWIELVLEKEDAPKLLKKMGKLFAEQNK

SEQ ID NO: 25 - DNA, 1647 bp, Lactococcus lactis
atgtatactgtgggggattacctgctggatcgcctgcacgaactggggattgaagaaattttcggtgtgccaggcgattataacctgcagttcctggaccagattatctcgcacaaagatatgaagtgggtcggtaacgccaacgaactgaacgcgagctatatggcagatggttatgcccgtaccaaaaaagctgctgcgtttctgacgacctttggcgttggcgaactgagcgccgtcaacggactggcaggaagctacgccgagaacctgccagttgtcgaaattgttgggtcgcctacttctaaggttcagaatgaaggcaaatttgtgcaccatactctggctgatggggattttaaacattttatgaaaatgcatgaaccggttactgcggcccgcacgctgctgacagcagagaatgctacggttgagatcgaccgcgtcctgtctgcgctgctgaaagagcgcaagccggtatatatcaatctgcctgtcgatgttgccgcagcgaaagccgaaaagccgtcgctgccactgaaaaaagaaaacagcacctccaatacatcggaccaggaaattctgaataaaatccaggaatcactgaagaatgcgaagaaaccgatcgtcatcaccggacatgagatcatctcttttggcctggaaaaaacggtcacgcagttcatttctaagaccaaactgcctatcaccaccctgaacttcggcaaatctagcgtcgatgaagcgctgccgagttttctgggtatctataatggtaccctgtccgaaccgaacctgaaagaattcgtcgaaagcgcggactttatcctgatgctgggcgtgaaactgacggatagctccacaggcgcatttacccaccatctgaacgagaataaaatgatttccctgaatatcgacgaaggcaaaatctttaacgagcgcatccagaacttcgattttgaatctctgattagttcgctgctggatctgtccgaaattgagtataaaggtaaatatattgataaaaaacaggaggattttgtgccgtctaatgcgctgctgagtcaggatcgtctgtggcaagccgtagaaaacctgacacagtctaatgaaacgattgttgcggaacagggaacttcatttttcggcgcctcatccatttttctgaaatccaaaagccatttcattggccaaccgctgtgggggagtattggttatacctttccggcggcgctgggttcacagattgcagataaggaatcacgccatctgctgtttattggtgacggcagcctgcagctgactgtccaggaactggggctggcgatccgtgaaaaaatcaatccgatttgctttatcatcaataacgacggctacaccgtcgaacgcgaaattcatggaccgaatcaaagttacaatgacatcccgatgtggaactatagcaaactgccggaatcctttggcgcgacagaggatcgcgtggtgagtaaaattgtgcgtacggaaaacgaatttgtgtcggttatgaaagaagcgcaggctgacccgaatcgcatgtattggattgaactgatcctggcaaaagaaggcgcaccgaaagttctgaaaaagatggggaaactgtttgcggagcaaaataaaagctaa

SEQ ID NO: 26 - protein, 548 aa, Lactococcus lactis
MYTVGDYLLDRLHELGIEEIFGVPGDYNLQFLDQIISHKDMKWVGNANELNASYMADGYARTKKAAAFLTTFGVGELSAVNGLAGSYAENLPVVEIVGSPTSKVQNEGKFVHHTLADGDFKHFMKMHEPVTAARTLLTAENATVEIDRVLSALLKERKPVYINLPVDVAAAKAEKPSLPLKKENSTSNTSDQEILNKIQESLKNAKKPIVITGHEIISFGLEKTVTQFISKTKLPITTLNFGKSSVDEALPSFLGIYNGTLSEPNLKEFVESADFILMLGVKLTDSSTGAFTHHLNENKMISLNIDEGKIFNERIQNFDFESLISSLLDLSEIEYKGKYIDKKQEDFVPSNALLSQDRLWQAVENLTQSNETIVAEQGTSFFGASSIFLKSKSHFIGQPLWGSIGYTFPAALGSQIADKESRHLLFIGDGSLQLTVQELGLAIREKINPICFIINNDGYTVEREIHGPNQSYNDIPMWNYSKLPESFGATEDRVVSKIVRTENEFVSVMKEAQADPNRMYWIELILAKEGAPKVLKKMGKLFAEQNKS

SEQ ID NO: 27 - DNA, 1653 bp, Salmonella typhimurium
atgcaaaacccctataccgtggccgactatttgctggacagactggcaggatgcggcattggccatctttttggcgtaccgggcgattataacttgcagtttcttgaccatgtgattgaccacccgaccctgcgttgggtgggatgcgccaatgagctgaacgccgcttatgccgcggacggctatgcgcgcatgtcgggcgctggagcgctactcaccacctttggcgtgggagaacttagcgctattaacggtatcgcgggcagttacgcggaatatgtcccggtcttgcatatcgtcggcgcgccctgtagcgctgcgcagcagcgtggcgaattgatgcaccataccctcggtgacggcgattttcgtcatttttatcgcatgagtcaggcgatatccgctgccagcgcaatattagatgaacagaacgcctgtttcgagattgaccgcgtgttgggtgaaatgcttgccgcacgcaggccaggatacatcatgttgcccgccgatgtggcgaaaaaaacggccatcccacctacgcaggcgctggcgttgcccgtgcatgaagcgcaaagcggcgtggagacggcctttcgttatcacgcccgtcagtgcctgatgaacagtcggcgcattgcgctattggccgactttcttgccgggcgttttggtttacgaccactgttgcagcgctggatggcggaaacgcccatcgctcatgcgacactactgatggggaaggggctttttgatgaacagcacccgaacttcgttggcacctatagcgctggcgccagcagcaaagaagtgcgtcaggccatagaggacgccgatagggttatctgcgtcggcacccgttttgtcgatacccttacggccggatttacccaacaattaccggcggaacgcacgctggagattcagccttacgcgtcgcgcatcggcgaaacctggttcaacctcccgatggcgcaggcggtgtctacgctgcgcgaactgtgcctggaatgcgcttttgcgccgccgccgacgcgttccgccggacagccagtgcggattgataaaggagaactgacccaggaaagcttctggcaaaccttacagcagtatctcaaacccggagatattatccttgtcgaccaggggacagcagcttttggcgctgccgcgctgtcgcttcctgacggcgcggaagttgtgttacagccgctgtgggggtctatcggctattccttgcccgccgcgtttggcgcgcaaaccgcctgtcccgatcggcgggtgattctgattatcggcgatggcgcggcgcagctcacgattcaggagatgggctcgatgttacgcgacgggcaggcgccggtcatcctgctgctcaacaatgacggctataccgtagagcgcgccattcacggcgcggcccagcggtataacgacatcgcgagctggaactggacgcagataccaccggcgctaaacgcggcgcaacaggcggagtgctggcgggtgacgcaggctatccaactggcagaggtcctcgaacggttggcgcgcccacaacgtctgtcatttattgaagtgatgttgccaaaagccgatctgccggaattactgcgtaccgtgacccgggcgctggaagcccgcaacgggggataa

SEQ ID NO: 28 - protein, 550 aa, Salmonella typhimurium
MQNPYTVADYLLDRLAGCGIGHLFGVPGDYNLQFLDHVIDHPTLRWVGCANELNAAYAADGYARMSGAGALLTTFGVGELSAINGIAGSYAEYVPVLHIVGAPCSAAQQRGELMHHTLGDGDFRHFYRMSQAISAASAILDEQNACFEIDRVLGEMLAARRPGYIMLPADVAKKTAIPPTQALALPVHEAQSGVETAFRYHARQCLMNSRRIALLADFLAGRFGLRPLLQRWMAETPIAHATLLMGKGLFDEQHPNFVGTYSAGASSKEVRQAIEDADRVICVGTRFVDTLTAGFTQQLPAERTLEIQPYASRIGETWFNLPMAQAVSTLRELCLECAFAPPPTRSAGQPVRIDKGELTQESFWQTLQQYLKPGDIILVDQGTAAFGAAALSLPDGAEVVLQPLWGSIGYSLPAAFGAQTACPDRRVILIIGDGAAQLTIQEMGSMLRDGQAPVILLLNNDGYTVERAIHGAAQRYNDIASWNWTQIPPALNAAQQAECWRVTQAIQLAEVLERLARPQRLSFIEVMLPKADLPELLRTVTRALEARNGG

SEQ ID NO: 29 - DNA, 1665 bp, Clostridium acetobutylicum
ttgaagagtgaatacacaattggaagatatttgttagaccgtttatcagagttgggtattcggcatatctttggtgtacctggagattacaatctatcctttttagactatataatggagtacaaagggatagattgggttggaaattgcaatgaattgaatgctgggtatgctgctgatggatatgcaagaataaatggaattggagccatacttacaacatttggtgttggagaattaagtgccattaacgcaattgctggggcatacgctgagcaagttccagttgttaaaattacaggtatccccacagcaaaagttagggacaatggattatatgtacaccacacattaggtgacggaaggtttgatcacttttttgaaatgtttagagaagtaacagttgctgaggcattactaagcgaagaaaatgcagcacaagaaattgatcgtgttcttatttcatgctggagacaaaaacgtcctgttcttataaatttaccgattgatgtatatgataaaccaattaacaaaccattaaagccattactcgattatactatttcaagtaacaaagaggctgcatgtgaatttgttacagaaatagtacctataataaatagggcaaaaaagcctgttattcttgcagattatggagtatatcgttaccaagttcaacatgtgcttaaaaacttggccgaaaaaaccggatttcctgtggctacactaagtatgggaaaaggtgttttcaatgaagcacaccctcaatttattggtgtttataatggtgatgtaagttctccttatttaaggcagcgagttgatgaagcagactgcattattagcgttggtgtaaaattgacggattcaaccacagggggattttctcatggattttctaaaaggaatgtaattcacattgatcctttttcaataaaggcaaaaggtaaaaaatatgcacctattacgatgaaagatgctttaacagaattaacaagtaaaattgagcatagaaactttgaggatttagatataaagccttacaaatcagataatcaaaagtattttgcaaaagagaagccaattacacaaaaacgtttttttgagcgtattgctcactttataaaagaaaaagatgtattattagcagaacagggtacatgcttttttggtgcgtcaaccatacaactacccaaagatgcaacttttattggtcaacctttatggggatctattggatacacacttcctgctttattaggttcacaattagctgatcaaaaaaggcgtaatattcttttaattggggatggtgcatttcaaatgacagcacaagaaatttcaacaatgcttcgtttacaaatcaaacctattatttttttaattaataacgatggttatacaattgaacgtgctattcatggtagagaacaagtatataacaatattcaaatgtggcgatatcataatgttccaaaggttttaggtcctaaagaatgcagcttaacctttaaagtacaaagtgaaactgaacttgaaaaggctcttttagtggcagataaggattgtgaacatttgatttttatagaagttgttatggatcgttatgataaacccgagcctttagaacgtctttcgaaacgttttgcaaatcaaaataattag

SEQ ID NO: 30 - protein, 554 aa, Clostridium acetobutylicum
MKSEYTIGRYLLDRLSELGIRHIFGVPGDYNLSFLDYIMEYKGIDWVGNCNELNAGYAADGYARINGIGAILTTFGVGELSAINAIAGAYAEQVPVVKITGIPTAKVRDNGLYVHHTLGDGRFDHFFEMFREVTVAEALLSEENAAQEIDRVLISCWRQKRPVLINLPIDVYDKPINKPLKPLLDYTISSNKEAACEFVTEIVPIINRAKKPVILADYGVYRYQVQHVLKNLAEKTGFPVATLSMGKGVFNEAHPQFIGVYNGDVSSPYLRQRVDEADCIISVGVKLTDSTTGGFSHGFSKRNVIHIDPFSIKAKGKKYAPITMKDALTELTSKIEHRNFEDLDIKPYKSDNQKYFAKEKPITQKRFFERIAHFIKEKDVLLAEQGTCFFGASTIQLPKDATFIGQPLWGSIGYTLPALLGSQLADQKRRNILLIGDGAFQMTAQEISTMLRLQIKPIIFLINNDGYTIERAIHGREQVYNNIQMWRYHNVPKVLGPKECSLTFKVQSETELEKALLVADKDCEHLIFIEVVMDRYDKPEPLERLSKRFANQNN

SEQ ID NO: 31 - DNA, 939 bp, Saccharomyces cerevisiae
atgcctgctacgttaaagaattcttctgctacattaaaactaaatactggtgcctccattccagtgttgggtttcggcacttggcgttccgttgacaataacggttaccattctgtaattgcagctttgaaagctggatacagacacattgatgctgcggctatctatttgaatgaagaagaagttggcagggctattaaagattccggagtccctcgtgaggaaatttttattactactaagctttggggtacggaacaacgtgatccggaagctgctctaaacaagtctttgaaaagactaggcttggattatgttgacctatatctgatgcattggccagtgcctttgaaaaccgacagagttactgatggtaacgttctgtgcattccaacattagaagatggcactgttgacatcgatactaaggaatggaattttatcaagacgtgggagttgatgcaagagttgccaaagacgggcaaaactaaagccgttggtgtctctaatttttctattaacaacattaaagaattattagaatctccaaataacaaggtggtaccagctactaatcaaattgaaattcatccattgctaccacaagacgaattgattgccttttgtaaggaaaagggtattgttgttgaagcctactcaccatttgggagtgctaatgctcctttactaaaagagcaagcaattattgatatggctaaaaagcacggcgttgagccagcacagcttattatcagttggagtattcaaagaggctacgttgttctggccaaatcggttaatcctgaaagaattgtatccaattttaagattttcactctgcctgaggatgatttcaagactattagtaacctatccaaagtgcatggtacaaagagagtcgttgatatgaagtggggatccttcccaattttccaatga

SEQ ID NO: 32 - protein, 312 aa, Saccharomyces cerevisiae
MPATLKNSSATLKLNTGASIPVLGFGTWRSVDNNGYHSVIAALKAGYRHIDAAAIYLNEEEVGRAIKDSGVPREEIFITTKLWGTEQRDPEAALNKSLKRLGLDYVDLYLMHWPVPLKTDRVTDGNVLCIPTLEDGTVDIDTKEWNFIKTWELMQELPKTGKTKAVGVSNFSINNIKELLESPNNKVVPATNQIEIHPLLPQDELIAFCKEKGIVVEAYSPFGSANAPLLKEQAIIDMAKKHGVEPAQLIISWSIQRGYVVLAKSVNPERIVSNFKIFTLPEDDFKTISNLSKVHGTKRVVDMKWGSFPIFQ

SEQ ID NO: 33 - DNA, 1083 bp, Saccharomyces cerevisiae
atgtcttatcctgagaaatttgaaggtatcgctattcaatcacacgaagattggaaaaacccaaagaagacaaagtatgacccaaaaccattttacgatcatgacattgacattaagatcgaagcatgtggtgtctgcggtagtgatattcattgtgcagctggtcattggggcaatatgaagatgccgctagtcgttggtcatgaaatcgttggtaaagttgtcaagctagggcccaagtcaaacagtgggttgaaagtcggtcaacgtgttggtgtaggtgctcaagtcttttcatgcttggaatgtgaccgttgtaagaatgataatgaaccatactgcaccaagtttgttaccacatacagtcagccttatgaagacggctatgtgtcgcagggtggctatgcaaactacgtcagagttcatgaacattttgtggtgcctatcccagagaatattccatcacatttggctgctccactattatgtggtggtttgactgtgtactctccattggttcgtaacggttgcggtccaggtaaaaaagttggtatagttggtcttggtggtatcggcagtatgggtacattgatttccaaagccatgggggcagagacgtatgttatttctcgttcttcgagaaaaagagaagatgcaatgaagatgggcgccgatcactacattgctacattagaagaaggtgattggggtgaaaagtactttgacaccttcgacctgattgtagtctgtgcttcctcccttaccgacattgacttcaacattatgccaaaggctatgaaggttggtggtagaattgtctcaatctctataccagaacaacacgaaatgttatcgctaaagccatatggcttaaaggctgtctccatttcttacagtgctttaggttccatcaaagaattgaaccaactcttgaaattagtctctgaaaaagatatcaaaatttgggtggaaacattacctgttggtgaagccggcgtccatgaagccttcgaaaggatggaaaagggtgacgttagatatagatttaccttagtcggctacgacaaagaattttcagactag

SEQ ID NO: 34 - protein, 360 aa, Saccharomyces cerevisiae
MSYPEKFEGIAIQSHEDWKNPKKTKYDPKPFYDHDIDIKIEACGVCGSDIHCAAGHWGNMKMPLVVGHEIVGKVVKLGPKSNSGLKVGQRVGVGAQVFSCLECDRCKNDNEPYCTKFVTTYSQPYEDGYVSQGGYANYVRVHEHFVVPIPENIPSHLAAPLLCGGLTVYSPLVRNGCGPGKKVGIVGLGGIGSMGTLISKAMGAETYVISRSSRKREDAMKMGADHYIATLEEGDWGEKYFDTFDLIVVCASSLTDIDFNIMPKAMKVGGRIVSISIPEQHEMLSLKPYGLKAVSISYSALGSIKELNQLLKLVSEKDIKIWVETLPVGEAGVHEAFERMEKGDVRYRFTLVGYDKEFSD

SEQ ID NO: 35 - DNA, 1164 bp, Escherichia coli
atgaacaactttaatctgcacaccccaacccgcattctgtttggtaaaggcgcaatcgctggtttacgcgaacaaattcctcacgatgctcgcgtattgattacctacggcggcggcagcgtgaaaaaaaccggcgttctcgatcaagttctggatgccctgaaaggcatggacgtgctggaatttggcggtattgagccaaacccggcttatgaaacgctgatgaacgccgtgaaactggttcgcgaacagaaagtgactttcctgctggcggttggcggcggttctgtactggacggcaccaaatttatcgccgcagcggctaactatccggaaaatatcgatccgtggcacattctgcaaacgggcggtaaagagattaaaagcgccatcccgatgggctgtgtgctgacgctgccagcaaccggttcagaatccaacgcaggcgcggtgatctcccgtaaaaccacaggcgacaagcaggcgttccattctgcccatgttcagccggtatttgccgtgctcgatccggtttatacctacaccctgccgccgcgtcaggtggctaacggcgtagtggacgcctttgtacacaccgtggaacagtatgttaccaaaccggttgatgccaaaattcaggaccgtttcgcagaaggcattttgctgacgctaatcgaagatggtccgaaagccctgaaagagccagaaaactacgatgtgcgcgccaacgtcatgtgggcggcgactcaggcgctgaacggtttgattggcgctggcgtaccgcaggactgggcaacgcatatgctgggccacgaactgactgcgatgcacggtctggatcacgcgcaaacactggctatcgtcctgcctgcactgtggaatgaaaaacgcgataccaagcgcgctaagctgctgcaatatgctgaacgcgtctggaacatcactgaaggttccgatgatgagcgtattgacgccgcgattgccgcaacccgcaatttctttgagcaattaggcgtgccgacccacctctccgactacggtctggacggcagctccatcccggctttgctgaaaaaactggaagagcacggcatgacccaactgggcgaaaatcatgacattacgttggatgtcagccgccgtatatacgaagccgcccgctaa

SEQ ID NO: 36 - protein, 387 aa, Escherichia coli
MNNFNLHTPTRILFGKGAIAGLREQIPHDARVLITYGGGSVKKTGVLDQVLDALKGMDVLEFGGIEPNPAYETLMNAVKLVREQKVTFLLAVGGGSVLDGTKFIAAAANYPENIDPWHILQTGGKEIKSAIPMGCVLTLPATGSESNAGAVISRKTTGDKQAFHSAHVQPVFAVLDPVYTYTLPPRQVANGVVDAFVHTVEQYVTKPVDAKIQDRFAEGILLTLIEDGPKALKEPENYDVRANVMWAATQALNGLIGAGVPQDWATHMLGHELTAMHGLDHAQTLAIVLPALWNEKRDTKRAKLLQYAERVWNITEGSDDERIDAAIAATRNFFEQLGVPTHLSDYGLDGSSIPALLKKLEEHGMTQLGENHDITLDVSRRIYEAAR

SEQ ID NO: 37 - DNA, 1170 bp, Clostridium acetobutylicum
atgctaagttttgattattcaataccaactaaagttttttttggaaaaggaaaaatagacgtaattggagaagaaattaagaaatatggctcaagagtgcttatagtttatggcggaggaagtataaaaaggaacggtatatatgatagagcaacagctatattaaaagaaaacaatatagctttctatgaactttcaggagtagagccaaatcctaggataacaacagtaaaaaaaggcatagaaatatgtagagaaaataatgtggatttagtattagcaatagggggaggaagtgcaatagactgttctaaggtaattgcagctggagtttattatgatggcgatacatgggacatggttaaagatccatctaaaataactaaagttcttccaattgcaagtatacttactctttcagcaacagggtctgaaatggatcaaattgcagtaatttcaaatatggagactaatgaaaagcttggagtaggacatgatgatatgagacctaaattttcagtgttagatcctacatatacttttacagtacctaaaaatcaaacagcagcgggaacagctgacattatgagtcacacctttgaatcttactttagtggtgttgaaggtgcttatgtgcaggacggtatagcagaagcaatcttaagaacatgtataaagtatggaaaaatagcaatggagaagactgatgattacgaggctagagctaatttgatgtgggcttcaagtttagctataaatggtctattatcacttggtaaggatagaaaatggagttgtcatcctatggaacacgagttaagtgcatattatgatataacacatggtgtaggacttgcaattttaacacctaattggatggaatatattctaaatgacgatacacttcataaatttgtttcttatggaataaatgtttggggaatagacaagaacaaagataactatgaaatagcacgagaggctattaaaaatacgagagaatactttaattcattgggtattccttcaaagcttagagaagttggaataggaaaagataaactagaactaatggcaaagcaagctgttagaaattctggaggaacaataggaagtttaagaccaataaatgcagaggatgttcttgagatatttaaaaaatcttattaa

SEQ ID NO: 38 - protein, 389 aa, Clostridium acetobutylicum
MLSFDYSIPTKVFFGKGKIDVIGEEIKKYGSRVLIVYGGGSIKRNGIYDRATAILKENNIAFYELSGVEPNPRITTVKKGIEICRENNVDLVLAIGGGSAIDCSKVIAAGVYYDGDTWDMVKDPSKITKVLPIASILTLSATGSEMDQIAVISNMETNEKLGVGHDDMRPKFSVLDPTYTFTVPKNQTAAGTADIMSHTFESYFSGVEGAYVQDGIAEAILRTCIKYGKIAMEKTDDYEARANLMWASSLAINGLLSLGKDRKWSCHPMEHELSAYYDITHGVGLAILTPNWMEYILNDDTLHKFVSYGINVWGIDKNKDNYEIAREAIKNTREYFNSLGIPSKLREVGIGKDKLELMAKQAVRNSGGTIGSLRPINAEDVLEIFKKSY

SEQ ID NO: 39 - DNA, 1173 bp, Clostridium acetobutylicum
gtggttgatttcgaatattcaataccaactagaatttttttcggtaaagataagataaatgtacttggaagagagcttaaaaaatatggttctaaagtgcttatagtttatggtggaggaagtataaagagaaatggaatatatgataaagctgtaagtatacttgaaaaaaacagtattaaattttatgaacttgcaggagtagagccaaatccaagagtaactacagttgaaaaaggagttaaaatatgtagagaaaatggagttgaagtagtactagctataggtggaggaagtgcaatagattgcgcaaaggttatagcagcagcatgtgaatatgatggaaatccatgggatattgtgttagatggctcaaaaataaaaagggtgcttcctatagctagtatattaaccattgctgcaacaggatcagaaatggatacgtgggcagtaataaataatatggatacaaacgaaaaactaattgcggcacatccagatatggctcctaagttttctatattagatccaacgtatacgtataccgtacctaccaatcaaacagcagcaggaacagctgatattatgagtcatatatttgaggtgtattttagtaatacaaaaacagcatatttgcaggatagaatggcagaagcgttattaagaacttgtattaaatatggaggaatagctcttgagaagccggatgattatgaggcaagagccaatctaatgtgggcttcaagtcttgcgataaatggacttttaacatatggtaaagacactaattggagtgtacacttaatggaacatgaattaagtgcttattacgacataacacacggcgtagggcttgcaattttaacacctaattggatggagtatattttaaataatgatacagtgtacaagtttgttgaatatggtgtaaatgtttggggaatagacaaagaaaaaaatcactatgacatagcacatcaagcaatacaaaaaacaagagattactttgtaaatgtactaggtttaccatctagactgagagatgttggaattgaagaagaaaaattggacataatggcaaaggaatcagtaaagcttacaggaggaaccataggaaacctaagaccagtaaacgcctccgaagtcctacaaatattcaaaaaatctgtgtaa

SEQ ID NO: 40 - protein, 390 aa, Clostridium acetobutylicum
MVDFEYSIPTRIFFGKDKINVLGRELKKYGSKVLIVYGGGSIKRNGIYDKAVSILEKNSIKFYELAGVEPNPRVTTVEKGVKICRENGVEVVLAIGGGSAIDCAKVIAAACEYDGNPWDIVLDGSKIKRVLPIASILTIAATGSEMDTWAVINNMDTNEKLIAAHPDMAPKFSILDPTYTYTVPTNQTAAGTADIMSHIFEVYFSNTKTAYLQDRMAEALLRTCIKYGGIALEKPDDYEARANLMWASSLAINGLLTYGKDTNWSVHLMEHELSAYYDITHGVGLAILTPNWMEYILNNDTVYKFVEYGVNVWGIDKEKNHYDIAHQAIQKTRDYFVNVLGLPSRLRDVGIEEEKLDIMAKESVKLTGGTIGNLRPVNASEVLQIFKKSV

SEQ ID NO: 41 - DNA, 993 bp, Bacillus subtilis
atgagtacaaaccgacatcaagcactagggctgactgatcaggaagccgttgatatgtatagaaccatgctgttagcaagaaaaatcgatgaaagaatgtggctgttaaaccgttctggcaaaattccatttgtaatctcttgtcaaggacaggaagcagcacaggtaggagcggctttcgcacttgaccgtgaaatggattatgtattgccgtactacagagacatgggtgtcgtgctcgcgtttggcatgacagcaaaggacttaatgatgtccgggtttgcaaaagcagcagatccgaactcaggaggccgccagatgccgggacatttcggacaaaagaaaaaccgcattgtgacgggatcatctccggttacaacgcaagtgccgcacgcagtcggtattgcgcttgcgggacgtatggagaaaaaggatatcgcagcctttgttacattcggggaagggtcttcaaaccaaggcgatttccatgaaggggcaaactttgccgctgtccataagctgccggttattttcatgtgtgaaaacaacaaatacgcaatctcagtgccttacgataagcaagtcgcatgtgagaacatttccgaccgtgccataggctatgggatgcctggcgtaactgtgaatggaaatgatccgctggaagtttatcaagcggttaaagaagcacgcgaaagggcacgcagaggagaaggcccgacattaattgaaacgatttcttaccgccttacaccacattccagtgatgacgatgacagcagctacagaggccgtgaagaagtagaggaagcgaaaaaaagtgatcccctgcttacttatcaagcttacttaaaggaaacaggcctgctgtccgatgagatagaacaaaccatgctggatgaaattatggcaatcgtaaatgaagcgacggatgaagcggagaacgccccatatgcagctcctgagtcagcgcttgattatgtttatgcgaagtag

SEQ ID NO: 42 - protein, 330 aa, Bacillus subtilis
MSTNRHQALGLTDQEAVDMYRTMLLARKIDERMWLLNRSGKIPFVISCQGQEAAQVGAAFALDREMDYVLPYYRDMGVVLAFGMTAKDLMMSGFAKAADPNSGGRQMPGHFGQKKNRIVTGSSPVTTQVPHAVGIALAGRMEKKDIAAFVTFGEGSSNQGDFHEGANFAAVHKLPVIFMCENNKYAISVPYDKQVACENISDRAIGYGMPGVTVNGNDPLEVYQAVKEARERARRGEGPTLIETISYRLTPHSSDDDDSSYRGREEVEEAKKSDPLLTYQAYLKETGLLSDEIEQTMLDEIMAIVNEATDEAENAPYAAPESALDYVYAK

SEQ ID NO: 43 - DNA, 984 bp, Bacillus subtilis
atgtcagtaatgtcatatattgatgcaatcaatttggcgatgaaagaagaaatggaacgagattctcgcgttttcgtccttggggaagatgtaggaagaaaaggcggtgtgtttaaagcgacagcgggactctatgaacaatttggggaagagcgcgttatggatacgccgcttgctgaatctgcaatcgcaggagtcggtatcggagcggcaatgtacggaatgagaccgattgctgaaatgcagtttgctgatttcattatgccggcagtcaaccaaattatttctgaagcggctaaaatccgctaccgcagcaacaatgactggagctgtccgattgtcgtcagagcgccatacggcggaggcgtgcacggagccctgtatcattctcaatcagtcgaagcaattttcgccaaccagcccggactgaaaattgtcatgccatcaacaccatatgacgcgaaagggctcttaaaagccgcagttcgtgacgaagaccccgtgctgttttttgagcacaagcgggcataccgtctgataaagggcgaggttccggctgatgattatgtcctgccaatcggcaaggcggacgtaaaaagggaaggcgacgacatcacagtgatcacatacggcctgtgtgtccacttcgccttacaagctgcagaacgtctcgaaaaagatggcatttcagcgcatgtggtggatttaagaacagtttacccgcttgataaagaagccatcatcgaagctgcgtccaaaactggaaaggttcttttggtcacagaagatacaaaagaaggcagcatcatgagcgaagtagccgcaattatatccgagcattgtctgttcgacttagacgcgccgatcaaacggcttgcaggtcctgatattccggctatgccttatgcgccgacaatggaaaaatactttatggtcaaccctgataaagtggaagcggcgatgagagaattagcggagttttaa

SEQ ID NO: 44 - protein, 327 aa, Bacillus subtilis
MSVMSYIDAINLAMKEEMERDSRVFVLGEDVGRKGGVFKATAGLYEQFGEERVMDTPLAESAIAGVGIGAAMYGMRPIAEMQFADFIMPAVNQIISEAAKIRYRSNNDWSCPIVVRAPYGGGVHGALYHSQSVEAIFANQPGLKIVMPSTPYDAKGLLKAAVRDEDPVLFFEHKRAYRLIKGEVPADDYVLPIGKADVKREGDDITVITYGLCVHFALQAAERLEKDGISAHVVDLRTVYPLDKEAIIEAASKTGKVLLVTEDTKEGSIMSEVAAIISEHCLFDLDAPIKRLAGPDIPAMPYAPTMEKYFMVNPDKVEAAMRELAEF

SEQ ID NO: 45 - DNA, 1275 bp, Bacillus subtilis
atggcaattgaacaaatgacgatgccgcagcttggagaaagcgtaacagaggggacgatcagcaaatggcttgtcgcccccggtgataaagtgaacaaatacgatccgatcgcggaagtcatgacagataaggtaaatgcagaggttccgtcttcttttactggtacgataacagagcttgtgggagaagaaggccaaaccctgcaagtcggagaaatgatttgcaaaattgaaacagaaggcgcgaatccggctgaacaaaaacaagaacagccagcagcatcagaagccgctgagaaccctgttgcaaaaagtgctggagcagccgatcagcccaataaaaagcgctactcgccagctgttctccgtttggccggagagcacggcattgacctcgatcaagtgacaggaactggtgccggcgggcgcatcacacgaaaagatattcagcgcttaattgaaacaggcggcgtgcaagaacagaatcctgaggagctgaaaacagcagctcctgcaccgaagtctgcatcaaaacctgagccaaaagaagagacgtcatatcctgcgtctgcagccggtgataaagaaatccctgtcacaggtgtaagaaaagcaattgcttccaatatgaagcgaagcaaaacagaaattccgcatgcttggacgatgatggaagtcgacgtcacaaatatggttgcatatcgcaacagtataaaagattcttttaagaagacagaaggctttaatttaacgttcttcgccttttttgtaaaagcggtcgctcaggcgttaaaagaattcccgcaaatgaatagcatgtgggcgggggacaaaattattcagaaaaaggatatcaatatttcaattgcagttgccacagaggattctttatttgttccggtgattaaaaacgctgatgaaaaaacaattaaaggcattgcgaaagacattaccggcctagctaaaaaagtaagagacggaaaactcactgcagatgacatgcagggaggcacgtttaccgtcaacaacacaggttcgttcgggtctgttcagtcgatgggcattatcaactaccctcaggctgcgattcttcaagtagaatccatcgtcaaacgcccggttgtcatggacaatggcatgattgctgtcagagacatggttaatctgtgcctgtcattagatcacagagtgcttgacggtctcgtgtgcggacgattcctcggacgagtgaaacaaattttagaatcgattgacgagaagacatctgtttactaa

SEQ ID NO: 46 - protein, 424 aa, Bacillus subtilis
MAIEQMTMPQLGESVTEGTISKWLVAPGDKVNKYDPIAEVMTDKVNAEVPSSFTGTITELVGEEGQTLQVGEMICKIETEGANPAEQKQEQPAASEAAENPVAKSAGAADQPNKKRYSPAVLRLAGEHGIDLDQVTGTGAGGRITRKDIQRLIETGGVQEQNPEELKTAAPAPKSASKPEPKEETSYPASAAGDKEIPVTGVRKAIASNMKRSKTEIPHAWTMMEVDVTNMVAYRNSIKDSFKKTEGFNLTFFAFFVKAVAQALKEFPQMNSMWAGDKIIQKKDINISIAVATEDSLFVPVIKNADEKTIKGIAKDITGLAKKVRDGKLTADDMQGGTFTVNNTGSFGSVQSMGIINYPQAAILQVESIVKRPVVMDNGMIAVRDMVNLCLSLDHRVLDGLVCGRFLGRVKQILESIDEKTSVY

SEQ ID NO: 47 - DNA, 1425 bp, Bacillus subtilis
atggcaactgagtatgacgtagtcattctgggcggcggtaccggcggttatgttgcggccatcagagccgctcagctcggcttaaaaacagccgttgtggaaaaggaaaaactcgggggaacatgtctgcataaaggctgtatcccgagtaaagcgctgcttagaagcgcagaggtataccggacagctcgtgaagccgatcaattcggagtggaaacggctggcgtgtccctcaactttgaaaaagtgcagcagcgtaagcaagccgttgttgataagcttgcagcgggtgtaaatcatttaatgaaaaaaggaaaaattgacgtgtacaccggatatggacgtatccttggaccgtcaatcttctctccgctgccgggaacaatttctgttgagcggggaaatggcgaagaaaatgacatgctgatcccgaaacaagtgatcattgcaacaggatcaagaccgagaatgcttccgggtcttgaagtggacggtaagtctgtactgacttcagatgaggcgctccaaatggaggagctgccacagtcaatcatcattgtcggcggaggggttatcggtatcgaatgggcgtctatgcttcatgattttggcgttaaggtaacggttattgaatacgcggatcgcatattgccgactgaagatctagagatttcaaaagaaatggaaagtcttcttaagaaaaaaggcatccagttcataacaggggcaaaagtgctgcctgacacaatgacaaaaacatcagacgatatcagcatacaagcggaaaaagacggagaaaccgttacctattctgctgagaaaatgcttgtttccatcggcagacaggcaaatatcgaaggcatcggcctagagaacaccgatattgttactgaaaatggcatgatttcagtcaatgaaagctgccaaacgaaggaatctcatatttatgcaatcggagacgtaatcggtggcctgcagttagctcacgttgcttcacatgagggaattattgctgttgagcattttgcaggtctcaatccgcatccgcttgatccgacgcttgtgccgaagtgcatttactcaagccctgaagctgccagtgtcggcttaaccgaagacgaagcaaaggcgaacgggcataatgtcaaaatcggcaagttcccatttatggcgattggaaaagcgcttgtatacggtgaaagcgacggttttgtcaaaatcgtggctgaccgagatacagatgatattctcggcgttcatatgattggcccgcatgtcaccgacatgatttctgaagcgggtcttgccaaagtgctggacgcaacaccgtgggaggtcgggcaaacgattcacccgcatccaacgctttctgaagcaattggagaagctgcgcttgccgcagatggcaaagccattcatttttaa

SEQ ID NO: 48 - protein, 474 aa, Bacillus subtilis
MATEYDVVILGGGTGGYVAAIRAAQLGLKTAVVEKEKLGGTCLHKGCIPSKALLRSAEVYRTAREADQFGVETAGVSLNFEKVQQRKQAVVDKLAAGVNHLMKKGKIDVYTGYGRILGPSIFSPLPGTISVERGNGEENDMLIPKQVIIATGSRPRMLPGLEVDGKSVLTSDEALQMEELPQSIIIVGGGVIGIEWASMLHDFGVKVTVIEYADRILPTEDLEISKEMESLLKKKGIQFITGAKVLPDTMTKTSDDISIQAEKDGETVTYSAEKMLVSIGRQANIEGIGLENTDIVTENGMISVNESCQTKESHIYAIGDVIGGLQLAHVASHEGIIAVEHFAGLNPHPLDPTLVPKCIYSSPEAASVGLTEDEAKANGHNVKIGKFPFMAIGKALVYGESDGFVKIVADRDTDDILGVHMIGPHVTDMISEAGLAKVLDATPWEVGQTIHPHPTLSEAIGEAALAADGKAIHF

SEQ ID NO: 49 - DNA, 1233 bp, Pseudomonas putida
atgaacgagtacgcccccctgcgtttgcatgtgcccgagcccaccggccggccaggctgccagaccgatttttcctacctgcgcctgaacgatgcaggtcaagcccgtaaaccccctgtcgatgtcgacgctgccgacaccgccgacctgtcctacagcctggtccgcgtgctcgacgagcaaggcgacgcccaaggcccgtgggctgaagacatcgacccgcagatcctgcgccaaggcatgcgcgccatgctcaagacgcggatcttcgacagccgcatggtggttgcccagcgccagaagaagatgtccttctacatgcagagcctgggcgaagaagccatcggcagcggccaggcgctggcgcttaaccgcaccgacatgtgcttccccacctaccgtcagcaaagcatcctgatggcccgcgacgtgtcgctggtggagatgatctgccagttgctgtccaacgaacgcgaccccctcaagggccgccagctgccgatcatgtactcggtacgcgaggccggcttcttcaccatcagcggcaacctggcgacccagttcgtgcaggcggtcggctgggccatggcctcggcgatcaagggcgataccaagattgcctcggcctggatcggcgacggcgccactgccgaatcggacttccacaccgccctcacctttgcccacgtttaccgcgccccggtgatcctcaacgtggtcaacaaccagtgggccatctcaaccttccaggccatcgccggtggcgagtcgaccaccttcgccggccgtggcgtgggctgcggcatcgcttcgctgcgggtggacggcaacgacttcgtcgccgtttacgccgcttcgcgctgggctgccgaacgtgcccgccgtggtttgggcccgagcctgatcgagtgggtcacctaccgtgccggcccgcactcgacctcggacgacccgtccaagtaccgccctgccgatgactggagccacttcccgctgggtgacccgatcgcccgcctgaagcagcacctgatcaagatcggccactggtccgaagaagaacaccaggccaccacggccgagttcgaagcggccgtgattgctgcgcaaaaagaagccgagcagtacggcaccctggccaacggtcacatcccgagcgccgcctcgatgttcgaggacgtgtacaaggagatgcccgaccacctgcgccgccaacgccaggaactgggggtttga

SEQ ID NO: 50 - protein, 410 aa, Pseudomonas putida
MNEYAPLRLHVPEPTGRPGCQTDFSYLRLNDAGQARKPPVDVDAADTADLSYSLVRVLDEQGDAQGPWAEDIDPQILRQGMRAMLKTRIFDSRMVVAQRQKKMSFYMQSLGEEAIGSGQALALNRTDMCFPTYRQQSILMARDVSLVEMICQLLSNERDPLKGRQLPIMYSVREAGFFTISGNLATQFVQAVGWAMASAIKGDTKIASAWIGDGATAESDFHTALTFAHVYRAPVILNVVNNQWAISTFQAIAGGESTTFAGRGVGCGIASLRVDGNDFVAVYAASRWAAERARRGLGPSLIEWVTYRAGPHSTSDDPSKYRPADDWSHFPLGDPIARLKQHLIKIGHWSEEEHQATTAEFEAAVIAAQKEAEQYGTLANGHIPSAASMFEDVYKEMPDHLRRQRQELGV

SEQ ID NO: 51 - DNA, 1059 bp, Pseudomonas putida
atgaacgaccacaacaacagcatcaacccggaaaccgccatggccaccactaccatgaccatgatccaggccctgcgctcggccatggatgtcatgcttgagcgcgacgacaatgtggtggtgtacggccaggacgtcggctacttcggcggcgtgttccgctgcaccgaaggcctgcagaccaagtacggcaagtcccgcgtgttcgacgcgcccatctctgaaagcggcatcgtcggcaccgccgtgggcatgggtgcctacggcctgcgcccggtggtggaaatccagttcgctgactacttctacccggcctccgaccagatcgtttctgaaatggcccgcctgcgctaccgttcggccggcgagttcatcgccccgctgaccctgcgtatgccctgcggtggcggtatctatggcggccagacacacagccagagcccggaagcgatgttcactcaggtgtgcggcctgcgcaccgtaatgccatccaacccgtacgacgccaaaggcctgctgattgcctcgatcgaatgcgacgacccggtgatcttcctggagcccaagcgcctgtacaacggcccgttcgacggccaccatgaccgcccggttacgccgtggtcgaaacacccgcacagcgccgtgcccgatggctactacaccgtgccactggacaaggccgccatcacccgccccggcaatgacgtgagcgtgctcacctatggcaccaccgtgtacgtggcccaggtggccgccgaagaaagtggcgtggatgccgaagtgatcgacctgcgcagcctgtggccgctagacctggacaccatcgtcgagtcggtgaaaaagaccggccgttgcgtggtagtacacgaggccacccgtacttgtggctttggcgcagaactggtgtcgctggtgcaggagcactgcttccaccacctggaggcgccgatcgagcgcgtcaccggttgggacaccccctaccctcacgcgcaggaatgggcttacttcccagggccttcgcgggtaggtgcggcattgaaaaaggtcatggaggtctga

SEQ ID NO: 52 - protein, 352 aa, Pseudomonas putida
MNDHNNSINPETAMATTTMTMIQALRSAMDVMLERDDNVVVYGQDVGYFGGVFRCTEGLQTKYGKSRVFDAPISESGIVGTAVGMGAYGLRPVVEIQFADYFYPASDQIVSEMARLRYRSAGEFIAPLTLRMPCGGGIYGGQTHSQSPEAMFTQVCGLRTVMPSNPYDAKGLLIASIECDDPVIFLEPKRLYNGPFDGHHDRPVTPWSKHPHSAVPDGYYTVPLDKAAITRPGNDVSVLTYGTTVYVAQVAAEESGVDAEVIDLRSLWPLDLDTIVESVKKTGRCVVVHEATRTCGFGAELVSLVQEHCFHHLEAPIERVTGWDTPYPHAQEWAYFPGPSRVGAALKKVMEV

SEQ ID NO: 53 - DNA, 1272 bp, Pseudomonas putida
atgggcacgcacgtcatcaagatgccggacattggcgaaggcatcgcgcaggtcgaattggtggaatggttcgtcaaggtgggcgacatcatcgccgaggaccaagtggtagccgacgtcatgaccgacaaggccaccgtggaaatcccgtcgccggtcagcggcaaggtgctggccctgggtggccagccaggtgaagtgatggcggtcggcagtgagctgatccgcatcgaagtggaaggcagcggcaaccatgtggatgtgccgcaagccaagccggccgaagtgcctgcggcaccggtagccgctaaacctgaaccacagaaagacgttaaaccggcggcgtaccaggcgtcagccagccacgaggcagcgcccatcgtgccgcgccagccgggcgacaagccgctggcctcgccggcggtgcgcaaacgcgccctcgatgccggcatcgaattgcgttatgtgcacggcagcggcccggccgggcgcatcctgcacgaagacctcgacgcgttcatgagcaaaccgcaaagcgctgccgggcaaacccccaatggctatgccaggcgcaccgacagcgagcaggtgccggtgatcggcctgcgccgcaagatcgcccagcgcatgcaggacgccaagcgccgggtcgcgcacttcagctatgtggaagaaatcgacgtcaccgccctggaagccctgcgccagcagctcaacagcaagcacggcgacagccgcggcaagctgacactgctgccgttcctggtgcgcgccctggtcgtggcactgcgtgacttcccgcagataaacgccacctacgatgacgaagcgcagatcatcacccgccatggcgcggtgcatgtgggcatcgccacccaaggtgacaacggcctgatggtacccgtgctgcgccacgccgaagcgggcagcctgtgggccaatgccggtgagatttcacgcctggccaacgctgcgcgcaacaacaaggccagccgcgaagagctgtccggttcgaccattaccctgaccagcctcggcgccctgggcggcatcgtcagcacgccggtggtcaacaccccggaagtggcgatcgtcggtgtcaaccgcatggttgagcggcccgtggtgatcgacggccagatcgtcgtgcgcaagatgatgaacctgtccagctcgttcgaccaccgcgtggtcgatggcatggacgccgccctgttcatccaggccgtgcgtggcctgctcgaacaacccgcctgcctgttcgtggagtga

SEQ ID NO: 54 - protein, 423 aa, Pseudomonas putida
MGTHVIKMPDIGEGIAQVELVEWFVKVGDIIAEDQVVADVMTDKATVEIPSPVSGKVLALGGQPGEVMAVGSELIRIEVEGSGNHVDVPQAKPAEVPAAPVAAKPEPQKDVKPAAYQASASHEAAPIVPRQPGDKPLASPAVRKRALDAGIELRYVHGSGPAGRILHEDLDAFMSKPQSAAGQTPNGYARRTDSEQVPVIGLRRKIAQRMQDAKRRVAHFSYVEEIDVTALEALRQQLNSKHGDSRGKLTLLPFLVRALVVALRDFPQINATYDDEAQIITRHGAVHVGIATQGDNGLMVPVLRHAEAGSLWANAGEISRLANAARNNKASREELSGSTITLTSLGALGGIVSTPVVNTPEVAIVGVNRMVERPVVIDGQIVVRKMMNLSSSFDHRVVDGMDAALFIQAVRGLLEQPACLFVE

SEQ ID NO: 55 - DNA, 1380 bp, Pseudomonas putida
atgcaacagactatccagacaaccctgttgatcatcggcggcggccctggcggctatgtggcggccatccgcgccgggcaactgggcatccctaccgtgctggtggaaggccaggcgctgggcggtacctgcctgaacatcggctgcattccgtccaaggcgctgatccatgtggccgagcagttccaccaggcctcgcgctttaccgaaccctcgccgctgggcatcagcgtggcttcgccacgcctggacatcggccagagcgtggcctggaaagacggcatcgtcgatcgcctgaccactggtgtcgccgccctgctgaaaaagcacggggtgaaggtggtgcacggctgggccaaggtgcttgatggcaagcaggtcgaggtggatggccagcgcatccagtgcgagcacctgttgctggccacgggctccagcagtgtcgaactgccgatgctgccgttgggtgggccggtgatttcctcgaccgaggccctggcaccgaaagccctgccgcaacacctggtggtggtgggcggtggctacatcggcctggagctgggtatcgcctaccgcaagctcggcgcgcaggtcagcgtggtggaagcgcgcgagcgcatcctgccgacttacgacagcgaactgaccgccccggtggccgagtcgctgaaaaagctgggtatcgccctgcaccttggccacagcgtcgaaggttacgaaaatggctgcctgctggccaacgatggcaagggcggacaactgcgcctggaagccgaccgggtgctggtggccgtgggccgccgcccacgcaccaagggcttcaacctggaatgcctggacctgaagatgaatggtgccgcgattgccatcgacgagcgctgccagaccagcatgcacaacgtctgggccatcggcgacgtggccggcgaaccgatgctggcgcaccgggccatggcccagggcgagatggtggccgagatcatcgccggcaaggcacgccgcttcgaacccgctgcgatagccgccgtgtgcttcaccgacccggaagtggtcgtggtcggcaagacgccggaacaggccagtcagcaaggcctggactgcatcgtcgcgcagttcccgttcgccgccaacggccgggccatgagcctggagtcgaaaagcggtttcgtgcgcgtggtcgcgcggcgtgacaaccacctgatcctgggctggcaagcggttggcgtggcggtttccgagctgtccacggcgtttgcccagtcgctggagatgggtgcctgcctggaggatgtggccggtaccatccatgcccacccgaccctgggtgaagcggtacaggaagcggcactgcgtgccctgggccacgccctgcatatctga

SEQ ID NO: 56 - protein, 459 aa, Pseudomonas putida
MQQTIQTTLLIIGGGPGGYVAAIRAGQLGIPTVLVEGQALGGTCLNIGCIPSKALIHVAEQFHQASRFTEPSPLGISVASPRLDIGQSVAWKDGIVDRLTTGVAALLKKHGVKVVHGWAKVLDGKQVEVDGQRIQCEHLLLATGSSSVELPMLPLGGPVISSTEALAPKALPQHLVVVGGGYIGLELGIAYRKLGAQVSVVEARERILPTYDSELTAPVAESLKKLGIALHLGHSVEGYENGCLLANDGKGGQLRLEADRVLVAVGRRPRTKGFNLECLDLKMNGAAIAIDERCQTSMHNVWAIGDVAGEPMLAHRAMAQGEMVAEIIAGKARRFEPAAIAAVCFTDPEVVVVGKTPEQASQQGLDCIVAQFPFAANGRAMSLESKSGFVRVVARRDNHLILGWQAVGVAVSELSTAFAQSLEMGACLEDVAGTIHAHPTLGEAVQEAALRALGHALHI

SEQ ID NO: 57 - DNA, 1407 bp, Clostridium beijerinckii
atgaataaagacacactaatacctacaactaaagatttaaaattaaaaacaaatgttgaaaacattaatttaaagaactacaaggataattcttcatgtttcggagtattcgaaaatgttgaaaatgctataaacagcgctgtacacgcgcaaaagatattatcccttcattatacaaaagaacaaagagaaaaaatcataactgagataagaaaggccgcattagaaaataaagaggttttagctaccatgattctggaagaaacacatatgggaaggtatgaagataaaatattaaagcatgaattagtagctaaatatactcctggtacagaagatttaactactactgcttggtcaggtgataatggtcttacagttgtagaaatgtctccatatggcgttataggtgcaataactccttctacgaatccaactgaaactgtaatatgtaatagcatcggcatgatagctgctggaaatgctgtagtatttaacggacacccaggcgctaaaaaatgtgttgcttttgctattgaaatgataaataaagcaattatttcatgtggcggtcctgagaatttagtaacaactataaaaaatccaactatggaatccctagatgcaattattaagcatcctttaataaaacttctttgcggaactggaggtccaggaatggtaaaaaccctcttaaattctggcaagaaagctataggtgctggtgctggaaatccaccagttattgtagatgataccgctgatatagaaaaggctggtaagagtatcattgaaggctgttcttttgataataatttaccttgtattgcagaaaaagaagtatttgtttttgagaatgttgcagatgatttaatatctaacatgctaaaaaataatgctgtaattataaatgaagatcaagtatcaaaattaatagatttagtattacaaaaaaataatgaaactcaagaatactttataaacaaaaaatgggtaggaaaagatgcaaaattattctcagatgaaatagatgttgagtctccttcaaatattaaatgcatagtctgcgaagtaaatgcaaatcatccatttgtcatgacagaactcatgatgccaatattaccaattgtaagagttaaagatatagatgaagctgttaaatatacaaagatagcagaacaaaatagaaaacatagtgcctatatttattctaaaaatatagacaacctaaatagatttgaaagagaaattgatactactatttttgtaaagaatgctaaatcttttgctggtgttggttatgaagctgaaggatttacaactttcactattgctggatctactggtgaaggcataacctctgcaagaaattttacaagacaaagaagatgtgtacttgccggctaa

SEQ ID NO: 58 - protein, 468 aa, Clostridium beijerinckii
MNKDTLIPTTKDLKLKTNVENINLKNYKDNSSCFGVFENVENAINSAVHAQKILSLHYTKEQREKIITEIRKAALENKEVLATMILEETHMGRYEDKILKHELVAKYTPGTEDLTTTAWSGDNGLTVVEMSPYGVIGAITPSTNPTETVICNSIGMIAAGNAVVFNGHPGAKKCVAFAIEMINKAIISCGGPENLVTTIKNPTMESLDAIIKHPLIKLLCGTGGPGMVKTLLNSGKKAIGAGAGNPPVIVDDTADIEKAGKSIIEGCSFDNNLPCIAEKEVFVFENVADDLISNMLKNNAVIINEDQVSKLIDLVLQKNNETQEYFINKKWVGKDAKLFSDEIDVESPSNIKCIVCEVNANHPFVMTELMMPILPIVRVKDIDEAVKYTKIAEQNRKHSAYIYSKNIDNLNRFEREIDTTIFVKNAKSFAGVGYEAEGFTTFTIAGSTGEGITSARNFTRQRRCVLAG

SEQ ID NO: 59 - DNA, 2589 bp, Clostridium acetobutylicum
atgaaagtcacaacagtaaaggaattagatgaaaaactcaaggtaattaaagaagctcaaaaaaaattctcttgttactcgcaagaaatggttgatgaaatctttagaaatgcagcaatggcagcaatcgacgcaaggatagagctagcaaaagcagctgttttggaaaccggtatgggcttagttgaagacaaggttataaaaaatcattttgcaggcgaatacatctataacaaatataaggatgaaaaaacctgcggtataattgaacgaaatgaaccctacggaattacaaaaatagcagaacctataggagttgtagctgctataatccctgtaacaaaccccacatcaacaacaatatttaaatccttaatatcccttaaaactagaaatggaattttcttttcgcctcacccaagggcaaaaaaatccacaatactagcagctaaaacaatacttgatgcagccgttaagagtggtgccccggaaaatataataggttggatagatgaaccttcaattgaactaactcaatatttaatgcaaaaagcagatataacccttgcaactggtggtccctcactagttaaatctgcttattcttccggaaaaccagcaataggtgttggtccgggtaacaccccagtaataattgatgaatctgctcatataaaaatggcagtaagttcaattatattatccaaaacctatgataatggtgttatatgtgcttctgaacaatctgtaatagtcttaaaatccatatataacaaggtaaaagatgagttccaagaaagaggagcttatataataaagaaaaacgaattggataaagtccgtgaagtgatttttaaagatggatccgtaaaccctaaaatagtcggacagtcagcttatactatagcagctatggctggcataaaagtacctaaaaccacaagaatattaataggagaagttacctccttaggtgaagaagaaccttttgcccacgaaaaactatctcctgttttggctatgtatgaggctgacaattttgatgatgctttaaaaaaagcagtaactctaataaacttaggaggcctcggccatacctcaggaatatatgcagatgaaataaaagcacgagataaaatagatagatttagtagtgccatgaaaaccgtaagaacctttgtaaatatcccaacctcacaaggtgcaagtggagatctatataattttagaataccaccttctttcacgcttggctgcggattttggggaggaaattctgtttccgagaatgttggtccaaaacatcttttgaatattaaaaccgtagctgaaaggagagaaaacatgctttggtttagagttccacataaagtatattttaagttcggttgtcttcaatttgctttaaaagatttaaaagatctaaagaaaaaaagagcctttatagttactgatagtgacccctataatttaaactatgttgattcaataataaaaatacttgagcacctagatattgattttaaagtatttaataaggttggaagagaagctgatcttaaaaccataaaaaaagcaactgaagaaatgtcctcctttatgccagacactataatagctttaggtggtacccctgaaatgagctctgcaaagctaatgtgggtactatatgaacatccagaagtaaaatttgaagatcttgcaataaaatttatggacataagaaagagaatatatactttcccaaaactcggtaaaaaggctatgttagttgcaattacaacttctgctggttccggttctgaggttactccttttgctttagtaactgacaataacactggaaataagtacatgttagcagattatgaaatgacaccaaatatggcaattgtagatgcagaacttatgatgaaaatgccaaagggattaaccgcttattcaggtatagatgcactagtaaatagtatagaagcatacacatccgtatatgcttcagaatacacaaacggactagcactagaggcaatacgattaatatttaaatatttgcctgaggcttacaaaaacggaagaaccaatgaaaaagcaagagagaaaatggctcacgcttcaactatggcaggtatggcatccgctaatgcatttctaggtctatgtcattccatggcaataaaattaagttcagaacacaatattcctagtggcattgccaatgcattactaatagaagaagtaataaaatttaacgcagttgataatcctgtaaaacaagccccttgcccacaatataagtatccaaacaccatatttagatatgctcgaattgcagattatataaagcttggaggaaatactgatgaggaaaaggtagatctcttaattaacaaaatacatgaactaaaaaaagctttaaatataccaacttcaataaaggatgcaggtgttttggaggaaaacttctattcctcccttgatagaatatctgaacttgcactagatgatcaatgcacaggcgctaatcctagatttcctcttacaagtgagataaaagaaatgtatataaattgttttaaaaaacaaccttaa

SEQ ID NO: 60 - protein, 862 aa, Clostridium acetobutylicum
MKVTTVKELDEKLKVIKEAQKKFSCYSQEMVDEIFRNAAMAAIDARIELAKAAVLETGMGLVEDKVIKNHFAGEYIYNKYKDEKTCGIIERNEPYGITKIAEPIGVVAAIIPVTNPTSTTIFKSLISLKTRNGIFFSPHPRAKKSTILAAKTILDAAVKSGAPENIIGWIDEPSIELTQYLMQKADITLATGGPSLVKSAYSSGKPAIGVGPGNTPVIIDESAHIKMAVSSIILSKTYDNGVICASEQSVIVLKSIYNKVKDEFQERGAYIIKKNELDKVREVIFKDGSVNPKIVGQSAYTIAAMAGIKVPKTTRILIGEVTSLGEEEPFAHEKLSPVLAMYEADNFDDALKKAVTLINLGGLGHTSGIYADEIKARDKIDRFSSAMKTVRTFVNIPTSQGASGDLYNFRIPPSFTLGCGFWGGNSVSENVGPKHLLNIKTVAERRENMLWFRVPHKVYFKFGCLQFALKDLKDLKKKRAFIVTDSDPYNLNYVDSIIKILEHLDIDFKVFNKVGREADLKTIKKATEEMSSFMPDTIIALGGTPEMSSAKLMWVLYEHPEVKFEDLAIKFMDIRKRIYTFPKLGKKAMLVAITTSAGSGSEVTPFALVTDNNTGNKYMLADYEMTPNMAIVDAELMMKMPKGLTAYSGIDALVNSIEAYTSVYASEYTNGLALEAIRLIFKYLPEAYKNGRTNEKAREKMAHASTMAGMASANAFLGLCHSMAIKLSSEHNIPSGIANALLIEEVIKFNAVDNPVKQAPCPQYKYPNTIFRYARIADYIKLGGNTDEEKVDLLINKIHELKKALNIPTSIKDAGVLEENFYSSLDRISELALDDQCTGANPRFPLTSEIKEMYINCFKKQP

SEQ ID NO: 61 - DNA, 2577 bp, Clostridium acetobutylicum
atgaaagttacaaatcaaaaagaactaaaacaaaagctaaatgaattgagagaagcgcaaaagaagtttgcaacctatactcaagagcaagttgataaaatttttaaacaatgtgccatagccgcagctaaagaaagaataaacttagctaaattagcagtagaagaaacaggaataggtcttgtagaagataaaattataaaaaatcattttgcagcagaatatatatacaataaatataaaaatgaaaaaacttgtggcataatagaccatgacgattctttaggcataacaaaggttgctgaaccaattggaattgttgcagccatagttcctactactaatccaacttccacagcaattttcaaatcattaatttctttaaaaacaagaaacgcaatattcttttcaccacatccacgtgcaaaaaaatctacaattgctgcagcaaaattaattttagatgcagctgttaaagcaggagcacctaaaaatataataggctggatagatgagccatcaatagaactttctcaagatttgatgagtgaagctgatataatattagcaacaggaggtccttcaatggttaaagcggcctattcatctggaaaacctgcaattggtgttggagcaggaaatacaccagcaataatagatgagagtgcagatatagatatggcagtaagctccataattttatcaaagacttatgacaatggagtaatatgcgcttctgaacaatcaatattagttatgaattcaatatacgaaaaagttaaagaggaatttgtaaaacgaggatcatatatactcaatcaaaatgaaatagctaaaataaaagaaactatgtttaaaaatggagctattaatgctgacatagttggaaaatctgcttatataattgctaaaatggcaggaattgaagttcctcaaactacaaagatacttataggcgaagtacaatctgttgaaaaaagcgagctgttctcacatgaaaaactatcaccagtacttgcaatgtataaagttaaggattttgatgaagctctaaaaaaggcacaaaggctaatagaattaggtggaagtggacacacgtcatctttatatatagattcacaaaacaataaggataaagttaaagaatttggattagcaatgaaaacttcaaggacatttattaacatgccttcttcacagggagcaagcggagatttatacaattttgcgatagcaccatcatttactcttggatgcggcacttggggaggaaactctgtatcgcaaaatgtagagcctaaacatttattaaatattaaaagtgttgctgaaagaagggaaaatatgctttggtttaaagtgccacaaaaaatatattttaaatatggatgtcttagatttgcattaaaagaattaaaagatatgaataagaaaagagcctttatagtaacagataaagatctttttaaacttggatatgttaataaaataacaaaggtactagatgagatagatattaaatacagtatatttacagatattaaatctgatccaactattgattcagtaaaaaaaggtgctaaagaaatgcttaactttgaacctgatactataatctctattggtggtggatcgccaatggatgcagcaaaggttatgcacttgttatatgaatatccagaagcagaaattgaaaatctagctataaactttatggatataagaaagagaatatgcaatttccctaaattaggtacaaaggcgatttcagtagctattcctacaactgctggtaccggttcagaggcaacaccttttgcagttataactaatgatgaaacaggaatgaaataccctttaacttcttatgaattgaccccaaacatggcaataatagatactgaattaatgttaaatatgcctagaaaattaacagcagcaactggaatagatgcattagttcatgctatagaagcatatgtttcggttatggctacggattatactgatgaattagccttaagagcaataaaaatgatatttaaatatttgcctagagcctataaaaatgggactaacgacattgaagcaagagaaaaaatggcacatgcctctaatattgcggggatggcatttgcaaatgctttcttaggtgtatgccattcaatggctcataaacttggggcaatgcatcacgttccacatggaattgcttgtgctgtattaatagaagaagttattaaatataacgctacagactgtccaacaaagcaaacagcattccctcaatataaatctcctaatgctaagagaaaatatgctgaaattgcagagtatttgaatttaaagggtactagcgataccgaaaaggtaacagccttaatagaagctatttcaaagttaaagatagatttgagtattccacaaaatataagtgccgctggaataaataaaaaagatttttataatacgctagataaaatgtcagagcttgcttttgatgaccaatgtacaacagctaatcctaggtatccacttataagtgaacttaaggatatctatataaaatcattttaa

SEQ ID NO: 62 - protein, 858 aa, Clostridium acetobutylicum
MKVTNQKELKQKLNELREAQKKFATYTQEQVDKIFKQCAIAAAKERINLAKLAVEETGIGLVEDKIIKNHFAAEYIYNKYKNEKTCGIIDHDDSLGITKVAEPIGIVAAIVPTTNPTSTAIFKSLISLKTRNAIFFSPHPRAKKSTIAAAKLILDAAVKAGAPKNIIGWIDEPSIELSQDLMSEADIILATGGPSMVKAAYSSGKPAIGVGAGNTPAIIDESADIDMAVSSIILSKTYDNGVICASEQSILVMNSIYEKVKEEFVKRGSYILNQNEIAKIKETMFKNGAINADIVGKSAYIIAKMAGIEVPQTTKILIGEVQSVEKSELFSHEKLSPVLAMYKVKDFDEALKKAQRLIELGGSGHTSSLYIDSQNNKDKVKEFGLAMKTSRTFINMPSSQGASGDLYNFAIAPSFTLGCGTWGGNSVSQNVEPKHLLNIKSVAERRENMLWFKVPQKIYFKYGCLRFALKELKDMNKKRAFIVTDKDLFKLGYVNKITKVLDEIDIKYSIFTDIKSDPTIDSVKKGAKEMLNFEPDTIISIGGGSPMDAAKVMHLLYEYPEAEIENLAINFMDIRKRICNFPKLGTKAISVAIPTTAGTGSEATPFAVITNDETGMKYPLTSYELTPNMAIIDTELMLNMPRKLTAATGIDALVHAIEAYVSVMATDYTDELALRAIKMIFKYLPRAYKNGTNDIEAREKMAHASNIAGMAFANAFLGVCHSMAHKLGAMHHVPHGIACAVLIEEVIKYNATDCPTKQTAFPQYKSPNAKRKYAEIAEYLNLKGTSDTEKVTALIEAISKLKIDLSIPQNISAAGINKKDFYNTLDKMSELAFDDQCTTANPRYPLISELKDIYIKSF

SEQ ID NO: 63 - DNA, 924 bp, Pseudomonas putida
atgagcaagaaactcaaggcggccatcataggccccggcaatatcggtaccgatctggtgatgaagatgctccgttccgagtggattgagccggtgtggatggtcggcatcgaccccaactccgacggcctcaaacgcgcccgcgatttcggcatgaagaccacagccgaaggcgtcgacggcctgctcccgcacgtgctggacgacgacatccgcatcgccttcgacgccacctcggcctatgtgcatgccgagaatagccgcaagctcaacgcgcttggcgtgctgatggtcgacctgaccccggcggccatcggcccctactgcgtgccgccggtcaacctcaagcagcatgtcggccgcctggaaatgaacgtcaacatggtcacctgcggcggccaggccaccatccccatggtcgccgcggtgtcccgcgtgcagccggtggcctacgccgagatcgtcgccaccgtctcctcgcgctcggtcggcccgggcacgcgcaagaacatcgacgagttcacccgcaccaccgccggcgccatcgagcaggtcggcggcgccagggaaggcaaggcgatcatcgtcatcaacccggccgagccgccgctgatgatgcgcgacaccatccactgcctgaccgacagcgagccggaccaggctgcgatcaccgcttcggttcacgcgatgatcgccgaggtgcagaaatacgtgcccggctaccgcctgaagaacggcccggtgttcgacggcaaccgcgtgtcgatcttcatggaagtcgaaggcctgggcgactacctgcccaagtacgccggcaacctcgacatcatgaccgccgccgcgctgcgtaccggcgagatgttcgccgaggaaatcgccgccggcaccattcaactgccgcgtcgcgacatcgcgctggcttga

SEQ ID NO: 64 - protein, 307 aa, Pseudomonas putida
MSKKLKAAIIGPGNIGTDLVMKMLRSEWIEPVWMVGIDPNSDGLKRARDFGMKTTAEGVDGLLPHVLDDDIRIAFDATSAYVHAENSRKLNALGVLMVDLTPAAIGPYCVPPVNLKQHVGRLEMNVNMVTCGGQATIPMVAAVSRVQPVAYAEIVATVSSRSVGPGTRKNIDEFTRTTAGAIEQVGGAREGKAIIVINPAEPPLMMRDTIHCLTDSEPDQAAITASVHAMIAEVQKYVPGYRLKNGPVFDGNRVSIFMEVEGLGDYLPKYAGNLDIMTAAALRTGEMFAEEIAAGTIQLPRRDIALA

SEQ ID NO: 65 - DNA, 924 bp, Thermus thermophilus
atgtccgaaagggttaaggtagccatcctgggctccggcaacatcgggacggacctgatgtacaagctcctgaagaacccgggccacatggagcttgtggcggtggtggggatagaccccaagtccgagggcctggcccgggcgcgggccttagggttagaggcgagccacgaagggatcgcctacatcctggagaggccggagatcaagatcgtctttgacgccaccagcgccaaggcccacgtgcgccacgccaagctcctgagggaggcggggaagatcgccatagacctcacgccggcggcccggggcccttacgtggtgcccccggtgaacctgaaggaacacctggacaaggacaacgtgaacctcatcacctgcggggggcaggccaccatccccctggtctacgcggtgcaccgggtggcccccgtgctctacgcggagatggtctccacggtggcctcccgctccgcgggccccggcacccggcagaacatcgacgagttcaccttcaccaccgcccggggcctggaggccatcgggggggccaagaaggggaaggccatcatcatcctgaacccggcggaaccccccatcctcatgaccaacaccgtgcgctgcatccccgaggacgagggctttgaccgggaggccgtggtggcgagcgtccgggccatggagcgggaggtccaggcctacgtgcccggctaccgcctgaaggcggacccggtgtttgagaggcttcccaccccctggggggagcgcaccgtggtctccatgctcctggaggtggagggggcgggggactatttgcccaaatacgccggcaacctggacatcatgacggcttctgcccggagggtgggggaggtcttcgcccagcacctcctggggaagcccgtggaggaggtggtggcgtga

SEQ ID NO: 66 - protein, 307 aa, Thermus thermophilus
MSERVKVAILGSGNIGTDLMYKLLKNPGHMELVAVVGIDPKSEGLARARALGLEASHEGIAYILERPEIKIVFDATSAKAHVRHAKLLREAGKIAIDLTPAARGPYVVPPVNLKEHLDKDNVNLITCGGQATIPLVYAVHRVAPVLYAEMVSTVASRSAGPGTRQNIDEFTFTTARGLEAIGGAKKGKAIIILNPAEPPILMTNTVRCIPEDEGFDREAVVASVRAMEREVQAYVPGYRLKADPVFERLPTPWGERTVVSMLLEVEGAGDYLPKYAGNLDIMTASARRVGEVFAQHLLGKPVEEVVA

SEQ ID NO: 67 - DNA, 1254 bp, Escherichia coli
atgacattctccctttttggtgacaaatttacccgccactccggcattacgctgttgatggaagatctgaacgacggtttacgcacgcctggcgcgattatgctcggcggcggtaatccggcgcagatcccggaaatgcaggactacttccagacgctactgaccgacatgctggaaagtggcaaagcgactgatgcactgtgtaactacgacggtccacaggggaaaacggagctactcacactgcttgccggaatgctgcgcgagaagttgggttgggatatcgaaccacagaatattgcactaacaaacggcagccagagcgcgtttttctacttatttaacctgtttgccggacgccgtgccgatggtcgggtcaaaaaagtgctgttcccgcttgcaccggaatacattggctatgctgacgccggactggaagaagatctgtttgtctctgcgcgtccgaatattgaactgctgccggaaggccagtttaaataccacgtcgattttgagcatctgcatattggcgaagaaaccgggatgatttgcgtctcccggccgacgaatccaacaggcaatgtgattactgacgaagagttgctgaagcttgacgcgctggcgaatcaacacggcattccgctggtgattgataacgcttatggcgtcccgttcccgggtatcatcttcagtgaagcgcgcccgctatggaatccgaatatcgtgctgtgcatgagtctttccaagctgggtctacctggctcccgctgcggcattatcatcgccaatgaaaaaatcatcaccgccatcaccaatatgaacggcattatcagcctggcacctggcggtattggtccggcgatgatgtgtgaaatgattaagcgtaacgatctgctgcgcctgtctgaaacagtcatcaaaccgttttactaccagcgtgttcaggaaactatcgccatcattcgccgctatttaccggaaaatcgctgcctgattcataaaccggaaggagccattttcctctggctatggtttaaggatttgcccattacgaccaagcagctctatcagcgcctgaaagcacgcggcgtgctgatggtgccggggcacaacttcttcccagggctggataaaccgtggccgcatacgcatcaatgtatgcgcatgaactacgtaccagagccggagaaaattgaggcgggggtgaagattctggcggaagagatagaaagagcctgggctgaaagtcactaa

SEQ ID NO: 68 - protein, 417 aa, Escherichia coli
MTFSLFGDKFTRHSGITLLMEDLNDGLRTPGAIMLGGGNPAQIPEMQDYFQTLLTDMLESGKATDALCNYDGPQGKTELLTLLAGMLREKLGWDIEPQNIALTNGSQSAFFYLFNLFAGRRADGRVKKVLFPLAPEYIGYADAGLEEDLFVSARPNIELLPEGQFKYHVDFEHLHIGEETGMICVSRPTNPTGNVITDEELLKLDALANQHGIPLVIDNAYGVPFPGIIFSEARPLWNPNIVLCMSLSKLGLPGSRCGIIIANEKIITAITNMNGIISLAPGGIGPAMMCEMIKRNDLLRLSETVIKPFYYQRVQETIAIIRRYLPENRCLIHKPEGAIFLWLWFKDLPITTKQLYQRLKARGVLMVPGHNFFPGLDKPWPHTHQCMRMNYVPEPEKIEAGVKILAEEIERAWAESH

SEQ ID NO: 69 - DNA, 1278 bp, Bacillus licheniformis
gtgaagccgccattaagcaaaatcggagagaaaatgattgagaaaacaggggtcagggctgtgatgagcgatattcaggaagtcctggccggcggtgaacggtcatacattaatttaagtgcgggcaatccgatgattttgcccggcgtgtcagccatgtggaagtcggctcttgccgatctccttgacgatgacaggttttcttcggtgatcggccaatacggatcgagctatggaaccgatgaactgattgcaagtgttgtccgcttcttttcagagcggtatagcgccggcattcgaaaagagaacgtgttgattacagccggaagccagcagctgttttttctggcgatcaattcgttttgcggaatgggaagcggatctgtgatgaaaaaagccttgatcccgatgctgcctgactattcgggatacagcggggcggcactggagcgggagatgattgaggggatccctccgctcatatcgaaattggatgatcatacgtttcgatatgagctcgaccgtaaggggtttttagagaggatgcgcatcggtgctgtcttgctatcgcgcccgaacaatccttgcggaaacatcttgcctaaagaagatgtagcattcatttcagacgcatgccgagaagcgaatgttccgctgttcattgattccgcatatgctccgccttttccggcgattcactttatcgacatggaaccgattttcaacgagcagatcattcactgtatgagcctttcaaaagccggcctgcctggcgaaaggatcggaatcgccatcgggccgtcccggtatattcaggcaatggaagcttttcagtcgaatgcggcgatccattcttcaaggctggggcagtatatggctgcatcagtattgaatgacgggcgcctcgccgacgtgtcgctgaatgaagtcaggccatattaccgcaataaattcatgctgctcaaggaaacgcttttatgcaagatgcctgaagacatcaaatggtatctgcatcaaggggaaggatcgcttttcggatggctgtggtttgaagacctgccggtgaccgatgcagcgctgtatgagtatatgaaagcggatggagtcattatcgttcccggatcatctttctttcaccgtcaatcccggcgcctggcgcattcacaccagtgtatacgaatcagcctaaccgcggcggatgaagatattataaggggaatcgatgttttagctaaaattgcgaagggtgtatatgagaaacaggttgaatacttataa

SEQ ID NO: 70 - protein, 425 aa, Bacillus licheniformis
MKPPLSKIGEKMIEKTGVRAVMSDIQEVLAGGERSYINLSAGNPMILPGVSAMWKSALADLLDDDRFSSVIGQYGSSYGTDELIASVVRFFSERYSAGIRKENVLITAGSQQLFFLAINSFCGMGSGSVMKKALIPMLPDYSGYSGAALEREMIEGIPPLISKLDDHTFRYELDRKGFLERMRIGAVLLSRPNNPCGNILPKEDVAFISDACREANVPLFIDSAYAPPFPAIHFIDMEPIFNEQIIHCMSLSKAGLPGERIGIAIGPSRYIQAMEAFQSNAAIHSSRLGQYMAASVLNDGRLADVSLNEVRPYYRNKFMLLKETLLCKMPEDIKWYLHQGEGSLFGWLWFEDLPVTDAALYEYMKADGVIIVPGSSFFHRQSRRLAHSHQCIRISLTAADEDIIRGIDVLAKIAKGVYEKQVEYL

SEQ ID NO: 71 - DNA, 930 bp, Escherichia coli
atgaccacgaagaaagctgattacatttggttcaatggggagatggttcgctgggaagacgcgaaggtgcatgtgatgtcgcacgcgctgcactatggcacttcggtttttgaaggcatccgttgctacgactcgcacaaaggaccggttgtattccgccatcgtgagcatatgcagcgtctgcatgactccgccaaaatctatcgcttcccggtttcgcagagcattgatgagctgatggaagcttgtcgtgacgtgatccgcaaaaacaatctcaccagcgcctatatccgtccgctgatcttcgtcggtgatgttggcatgggagtaaacccgccagcgggatactcaaccgacgtgattatcgctgctttcccgtggggagcgtatctgggcgcagaagcgctggagcaggggatcgatgcgatggtttcctcctggaaccgcgcagcaccaaacaccatcccgacggcggcaaaagccggtggtaactacctctcttccctgctggtgggtagcgaagcgcgccgccacggttatcaggaaggtatcgcgctggatgtgaacggttatatctctgaaggcgcaggcgaaaacctgtttgaagtgaaagatggtgtgctgttcaccccaccgttcacctcctccgcgctgccgggtattacccgtgatgccatcatcaaactggcgaaagagctgggaattgaagtacgtgagcaggtgctgtcgcgcgaatccctgtacctggcggatgaagtgtttatgtccggtacggcggcagaaatcacgccagtgcgcagcgtagacggtattcaggttggcgaaggccgttgtggcccggttaccaaacgcattcagcaagccttcttcggcctcttcactggcgaaaccgaagataaatggggctggttagatcaagttaatcaataa

SEQ ID NO: 72 - protein, 309 aa, Escherichia coli
MTTKKADYIWFNGEMVRWEDAKVHVMSHALHYGTSVFEGIRCYDSHKGPVVFRHREHMQRLHDSAKIYRFPVSQSIDELMEACRDVIRKNNLTSAYIRPLIFVGDVGMGVNPPAGYSTDVIIAAFPWGAYLGAEALEQGIDAMVSSWNRAAPNTIPTAAKAGGNYLSSLLVGSEARRHGYQEGIALDVNGYISEGAGENLFEVKDGVLFTPPFTSSALPGITRDAIIKLAKELGIEVREQVLSRESLYLADEVFMSGTAAEITPVRSVDGIQVGEGRCGPVTKRIQQAFFGLFTGETEDKWGWLDQVNQ

SEQ ID NO: 73 - DNA, 1131 bp, Saccharomyces cerevisiae
atgaccttggcacccctagacgcctccaaagttaagataactaccacacaacatgcatctaagccaaaaccgaacagtgagttagtgtttggcaagagcttcacggaccacatgttaactgcggaatggacagctgaaaaagggtggggtaccccagagattaaaccttatcaaaatctgtctttagacccttccgcggtggttttccattatgcttttgagctattcgaagggatgaaggcttacagaacggtggacaacaaaattacaatgtttcgtccagatatgaatatgaagcgcatgaataagtctgctcagagaatctgtttgccaacgttcgacccagaagagttgattaccctaattgggaaactgatccagcaagataagtgcttagttcctgaaggaaaaggttactctttatatatcaggcctacattaatcggcactacggccggtttaggggtttccacgcctgatagagccttgctatatgtcatttgctgccctgtgggtccttattacaaaactggatttaaggcggtcagactggaagccactgattatgccacaagagcttggccaggaggctgtggtgacaagaaactaggtgcaaactacgccccctgcgtcctgccacaattgcaagctgcttcaaggggttaccaacaaaatttatggctatttggtccaaataacaacattactgaagtcggcaccatgaatgcttttttcgtgtttaaagatagtaaaacgggcaagaaggaactagttactgctccactagacggtaccattttggaaggtgttactagggattccattttaaatcttgctaaagaaagactcgaaccaagtgaatggaccattagtgaacgctacttcactataggcgaagttactgagagatccaagaacggtgaactacttgaagcctttggttctggtactgctgcgattgtttctcccattaaggaaatcggctggaaaggcgaacaaattaatattccgttgttgcccggcgaacaaaccggtccattggccaaagaagttgcacaatggattaatggaatccaatatggcgagactgagcatggcaattggtcaagggttgttactgatttgaactga

SEQ ID NO: 74 - protein, 376 aa, Saccharomyces cerevisiae
MTLAPLDASKVKITTTQHASKPKPNSELVFGKSFTDHMLTAEWTAEKGWGTPEIKPYQNLSLDPSAVVFHYAFELFEGMKAYRTVDNKITMFRPDMNMKRMNKSAQRICLPTFDPEELITLIGKLIQQDKCLVPEGKGYSLYIRPTLIGTTAGLGVSTPDRALLYVICCPVGPYYKTGFKAVRLEATDYATRAWPGGCGDKKLGANYAPCVLPQLQAASRGYQQNLWLFGPNNNITEVGTMNAFFVFKDSKTGKKELVTAPLDGTILEGVTRDSILNLAKERLEPSEWTISERYFTIGEVTERSKNGELLEAFGSGTAAIVSPIKEIGWKGEQINIPLLPGEQTGPLAKEVAQWINGIQYGETEHGNWSRVVTDLN

SEQ ID NO: 75 - DNA, 993 bp, Methanobacterium thermoautotrophicum
ttgcggttatggagagcattatataggcctccaaccataacctatcctagtaaatcacctgaggttattatcatgtcatgcgaagccagtggaaagatatggttaaacggtgaaatggttgaatgggaagaagccaccgtccacgtactctcacatgttgtgcattatggatcatctgtctttgagggaataaggtgctacaggaacagtaaggggtcagccatcttccgtttgcgggagcatgttaaacgcctttttgattctgcaaagatataccggatggacataccctacacccaggagcagatatgtgatgccatagttgagaccgtcagggagaacggacttgaggagtgctatataagacccgtggtattcaggggatacggtgagatgggtgttcacccggtgaactgcccagtggacgtcgctgtggctgcctgggaatggggggcctatctgggtgcagaggcccttgaggttggtgtcgatgctggtgtttcaacctggcggaggatggcaccaaacacaatgcccaacatggcaaaggccggcggtaactacctcaactcacagcttgccaagatggaggctgtgagacacggctatgatgaggccataatgctggactaccatggctacataagtgagggtagcggggagaacatattcctcgtcagtgagggtgaaatttacaccccccctgtttcatcatcccttctgagggggataacaagggactccgtaataaagatagccaggaccgagggtgttaccgtgcatgaggaacccataaccagggagatgctctacatcgcagatgaggccttcttcacaggtacagccgcagagataacacccatcagatcagttgatggtatagagataggtgccgggcgaaggggtcccgttacaaagctgctgcaggatgagttcttcaggataatcagggcagagacagaggacagcttcggatggctcacctacatctga

SEQ ID NO: 76 - protein, 330 aa, Methanobacterium thermoautotrophicum
MRLWRALYRPPTITYPSKSPEVIIMSCEASGKIWLNGEMVEWEEATVHVLSHVVHYGSSVFEGIRCYRNSKGSAIFRLREHVKRLFDSAKIYRMDIPYTQEQICDAIVETVRENGLEECYIRPVVFRGYGEMGVHPVNCPVDVAVAAWEWGAYLGAEALEVGVDAGVSTWRRMAPNTMPNMAKAGGNYLNSQLAKMEAVRHGYDEAIMLDYHGYISEGSGENIFLVSEGEIYTPPVSSSLLRGITRDSVIKIARTEGVTVHEEPITREMLYIADEAFFTGTAAEITPIRSVDGIEIGAGRRGPVTKLLQDEFFRIIRAETEDSFGWLTYI

SEQ ID NO: 77 - DNA, 1095 bp, Streptomyces coelicolor
gtgaccgacgtaaacggcgcacctgctgatgtactgcacaccctgttccactcggatcaggggggacatgagcaagtcgtgctctgccaggaccgtgccagcggcctcaaggccgtgatcgccctccactccaccgccctgggcccggcgctcggcggtacccgcttctacccgtacgcgagcgaggcggaggccgtcgccgacgcgctgaacctcgcccgcgggatgtcgtacaagaacgccatggccggtctggaccacggtggcggcaaggccgtgatcatcggcgatccggagcagatcaagagcgaggagctgctcctcgcctacggccggttcgtcgcctcgctgggcggccgctacgtcaccgcgtgcgacgtcggcacctacgtcgccgacatggacgtcgtggcccgcgagtgccgctggacgaccgggcgttccccggagaacggcggcgcgggcgactcctccgtgctcacctccttcggcgtctaccagggcatgcgggccgccgcccagcacctgtggggcgacccgacgctgcgcgaccgcaccgtcggcatcgcgggcgtcggcaaggtcggccaccacctggtcgagcacctgctcgccgagggcgcccacgtcgtcgtcacggacgtgcgcaaggacgtggtgcgcgggatcacggagcggcacccgtcggtggtcgccgtcgccgacaccgacgcgctgatccgggtggagaacctggacatctacgcgccctgcgcgctcggcggcgcgctgaacgacgacaccgtgccggtgctgaccgccaaggtggtgtgcggcgcggccaacaaccagctcgcccacccgggcgtcgagaaggacctcgccgaccgcgggatcctctacgcgccggactatgtggtgaacgccggcggtgtcatccaggtcgccgacgagctgcacgggttcgacttcgaccggtgcaaggcgaaggcctcgaagatctacgacaccacgctggccatattcgcacgtgcgaaggaggacggtattccgccggccgcggcggccgaccggatcgccgagcagcggatggcggaggcccgtccccggccgtga

SEQ ID NO: 78 - protein, 364 aa, Streptomyces coelicolor
MTDVNGAPADVLHTLFHSDQGGHEQVVLCQDRASGLKAVIALHSTALGPALGGTRFYPYASEAEAVADALNLARGMSYKNAMAGLDHGGGKAVIIGDPEQIKSEELLLAYGRFVASLGGRYVTACDVGTYVADMDVVARECRWTTGRSPENGGAGDSSVLTSFGVYQGMRAAAQHLWGDPTLRDRTVGIAGVGKVGHHLVEHLLAEGAHVVVTDVRKDVVRGITERHPSVVAVADTDALIRVENLDIYAPCALGGALNDDTVPVLTAKVVCGAANNQLAHPGVEKDLADRGILYAPDYVVNAGGVIQVADELHGFDFDRCKAKASKIYDTTLAIFARAKEDGIPPAAAADRIAEQRMAEARPRP

SEQ ID NO: 79 - DNA, 1095 bp, Bacillus subtilis
atggaactttttaaatatatggagaaatacgattacgaacaattggtattctgccaggatgaacaatctggattaaaagcgattatcgccattcatgatacaacgcttggtccggcgcttggcggaacgagaatgtggacatatgaaaatgaagaagcggcaattgaagatgcgctcagattggcaagaggcatgacctataagaacgcggcggcaggcttaaaccttggcggcggaaaaacagtcattatcggcgatccgcgcaaagacaaaaatgaggaaatgttccgcgcgtttggccgctatattcaaggactgaatggcagatacatcacggctgaagatgtgggcacaacggtcgaggatatggatatcattcatgatgagacagactatgtcacagggatttctcctgctttcggctcttctggaaatccgtccccagtcacagcgtacggggtgtacagaggaatgaaggcagcagctaaagctgctttcggaaccgactctcttgaaggaaaaaccattgctgtacagggtgttgggaacgtagcctataacctttgccgccacctgcatgaagaaggagcaaacttaatcgttacggatatcaacaaacaatctgtacagcgtgcagttgaagattttggcgcccgtgcggtagatcctgatgacatttattcacaagactgcgatatttatgcgccgtgtgcccttggtgcgactattaacgacgacaccattaaacagctgaaggcgaaagtgatcgcaggtgcggctaacaaccaattaaaagagacacgccatggtgatcaaattcacgaaatgggcatcgtttatgcaccggattacgtgattaacgcgggcggtgtcatcaacgtggcagatgagctttacggctataatgcagaacgtgcattgaaaaaagttgaaggcatttacggcaatatcgagcgtgtacttgagatttctcagcgtgacggcattcctgcatatttagcggctgaccgcttagcagaggaacggattgaacgcatgcgccgctcaagaagccagtttttgcaaaacggccacagtgtattaagcagacgttaa

SEQ ID NO: 80 - protein, 364 aa, Bacillus subtilis
MELFKYMEKYDYEQLVFCQDEQSGLKAIIAIHDTTLGPALGGTRMWTYENEEAAIEDALRLARGMTYKNAAAGLNLGGGKTVIIGDPRKDKNEEMFRAFGRYIQGLNGRYITAEDVGTTVEDMDIIHDETDYVTGISPAFGSSGNPSPVTAYGVYRGMKAAAKAAFGTDSLEGKTIAVQGVGNVAYNLCRHLHEEGANLIVTDINKQSVQRAVEDFGARAVDPDDIYSQDCDIYAPCALGATINDDTIKQLKAKVIAGAANNQLKETRHGDQIHEMGIVYAPDYVINAGGVINVADELYGYNAERALKKVEGIYGNIERVLEISQRDGIPAYLAADRLAEERIERMRRSRSQFLQNGHSVLSRR

SEQ ID NO: 81 - DNA, 1785 bp, Streptomyces viridifaciens
gtgtcaacttcctccgcttcttccgggccggacctccccttcgggcccgaggacacgccatggcagaaggccttcagcaggctgcgggcggtggatggcgtgccgcgcgtcaccgcgccgtccagtgatccgcgtgaggtctacatggacatcccggagatccccttctccaaggtccagatccccccggacggaatggacgagcagcagtacgcagaggccgagagcctcttccgccgctacgtagacgcccagacccgcaacttcgcgggataccaggtcaccagcgacctcgactaccagcacctcagtcactatctcaaccggcatctgaacaacgtcggcgatccctatgagtccagctcctacacgctgaactccaaggtccttgagcgagccgttctcgactacttcgcctccctgtggaacgccaagtggccccatgacgcaagcgatccggaaacgtactggggttacgtgctgaccatgggctccagcgaaggcaacctgtacgggttgtggaacgcacgggactatctgtcgggcaagctgctgcggcgccagcaccgggaggccggcggcgacaaggcctcggtcgtctacacgcaagcgctgcgacacgaagggcagagtccgcatgcctacgagccggtggcgttcttctcgcaggacacgcactactcgctcacgaaggccgtgcgggttctgggcatcgacaccttccacagcatcggcagcagtcggtatccggacgagaacccgctgggccccggcactccgtggccgaccgaagtgccctcggttgacggtgccatcgatgtcgacaaactcgcctcgttggtccgcttcttcgccagcaagggctacccgatactggtcagcctcaactacgggtcaacgttcaagggcgcctacgacgacgtcccggccgtggcacaggccgtgcgggacatctgcacggaatacggtctggatcggcggcgggtataccacgaccgcagtaaggacagtgacttcgacgagcgcagcggcttctggatccacatcgatgccgccctgggggcgggctacgctccctacctgcagatggcccgggatgccggcatggtcgaggaggcgccgcccgttttcgacttccggctcccggaggtgcactcgctgaccatgagcggccacaagtggatgggaacaccgtgggcatgcggtgtctacatgacacggaccgggctgcagatgaccccgccgaagtcgtccgagtacatcggggcggccgacaccaccttcgcgggctcccgcaacggcttctcgtcactgctgctgtgggactacctgtcccggcattcgtatgacgatctggtgcgcctggccgccgactgcgaccggctggccggctacgcccacgaccggttgctgaccttgcaggacaaactcggcatggatctgtgggtcgcccgcagcccgcagtccctcacggtgcgcttccgtcagccatgtgcagacatcgtccgcaagtactcgctgtcgtgtgagacggtctacgaagacaacgagcaacggacctacgtacatctctacgccgttccccacctcactcgggaactcgtggatgagctcgtgcgcgatctgcgccagcccggagccttcaccaacgctggtgcactggagggggaggcctgggccggggtgatcgatgccctcggccgcccggaccccgacggaacctatgccggcgccttgagcgctccggcttccggcccccgctccgaggacggcggcgggagctga

SEQ ID NO: 82 - protein, 594 aa, Streptomyces viridifaciens
MSTSSASSGPDLPFGPEDTPWQKAFSRLRAVDGVPRVTAPSSDPREVYMDIPEIPFSKVQIPPDGMDEQQYAEAESLFRRYVDAQTRNFAGYQVTSDLDYQHLSHYLNRHLNNVGDPYESSSYTLNSKVLERAVLDYFASLWNAKWPHDASDPETYWGYVLTMGSSEGNLYGLWNARDYLSGKLLRRQHREAGGDKASVVYTQALRHEGQSPHAYEPVAFFSQDTHYSLTKAVRVLGIDTFHSIGSSRYPDENPLGPGTPWPTEVPSVDGAIDVDKLASLVRFFASKGYPILVSLNYGSTFKGAYDDVPAVAQAVRDICTEYGLDRRRVYHDRSKDSDFDERSGFWIHIDAALGAGYAPYLQMARDAGMVEEAPPVFDFRLPEVHSLTMSGHKWMGTPWACGVYMTRTGLQMTPPKSSEYIGAADTTFAGSRNGFSSLLLWDYLSRHSYDDLVRLAADCDRLAGYAHDRLLTLQDKLGMDLWVARSPQSLTVRFRQPCADIVRKYSLSCETVYEDNEQRTYVHLYAVPHLTRELVDELVRDLRQPGAFTNAGALEGEAWAGVIDALGRPDPDGTYAGALSAPASGPRSEDGGGS

SEQ ID NO: 83 - DNA, 1323 bp, Alcaligenes denitrificans
atgagcgctgccaaactgcccgacctgtcccacctctggatgccctttaccgccaaccggcagttcaaggcgaacccccgcctgctggcctcggccaagggcatgtactacacgtctttcgacggccgccagatcctggacggcacggccggcctgtggtgcgtgaacgccggccactgccgcgaagaaatcgtctccgccatcgccagccaggccggcgtcatggactacgcgccggggttccagctcggccacccgctggccttcgaggccgccaccgccgtggccggcctgatgccgcagggcctggaccgcgtgttcttcaccaattcgggctccgaatcggtggacaccgcgctgaagatcgccctggcctaccaccgcgcgcgcggcgaggcgcagcgcacccgcctcatcgggcgcgagcgcggctaccacggcgtgggcttcggcggcatttccgtgggcggcatctcgcccaaccgcaagaccttctccggcgcgctgctgccggccgtggaccacctgccgcacacccacagcctggaacacaacgccttcacgcgcggccagcccgagtggggcgcgcacctggccgacgagttggaacgcatcatcgccctgcacgacgcctccaccatcgcggccgtgatcgtcgagcccatggccggctccaccggcgtgctcgtcccgcccaagggctatctcgaaaaactgcgcgaaatcaccgcccgccacggcattctgctgatcttcgacgaagtcatcaccgcgtacggccgcctgggcgaggccaccgccgcggcctatttcggcgtaacgcccgacctcatcaccatggccaagggcgtgagcaacgccgccgttccggccggcgccgtcgcggtgcgccgcgaagtgcatgacgccatcgtcaacggaccgcaaggcggcatcgagttcttccacggctacacctactcggcccacccgctggccgccgccgccgtgctcgccacgctggacatctaccgccgcgaagacctgttcgcccgcgcccgcaagctgtcggccgcgttcgaggaagccgcccacagcctcaagggcgcgccgcacgtcatcgacgtgcgcaacatcggcctggtggccggcatcgagctgtcgccgcgcgaaggcgccccgggcgcgcgcgccgccgaagccttccagaaatgcttcgacaccggcctcatggtgcgctacacgggcgacatcctcgcggtgtcgcctccgctcatcgtcgacgaaaaccagatcggccagatcttcgagggcatcggcaaggtgctcaaggaagtggcttag

SEQ ID NO: 84 - protein, 440 aa, Alcaligenes denitrificans
MSAAKLPDLSHLWMPFTANRQFKANPRLLASAKGMYYTSFDGRQILDGTAGLWCVNAGHCREEIVSAIASQAGVMDYAPGFQLGHPLAFEAATAVAGLMPQGLDRVFFTNSGSESVDTALKIALAYHRARGEAQRTRLIGRERGYHGVGFGGISVGGISPNRKTFSGALLPAVDHLPHTHSLEHNAFTRGQPEWGAHLADELERIIALHDASTIAAVIVEPMAGSTGVLVPPKGYLEKLREITARHGILLIFDEVITAYGRLGEATAAAYFGVTPDLITMAKGVSNAAVPAGAVAVRREVHDAIVNGPQGGIEFFHGYTYSAHPLAAAAVLATLDIYRREDLFARARKLSAAFEEAAHSLKGAPHVIDVRNIGLVAGIELSPREGAPGARAAEAFQKCFDTGLMVRYTGDILAVSPPLIVDENQIGQIFEGIGKVLKEVA

SEQ ID NO: 85 - DNA, 1332 bp, Ralstonia eutropha
atggacgccgcgaagaccgtgattcccgatctcgatgccctgtggatgccctttaccgcgaaccgccagtacaaggcggcgccgcgcctgctggcctcggccagcggcatgtactacaccacccacgacggacgccagatcctcgacggttgcgcgggcctctggtgcgtagcggccggccactgccgcaaggagattgccgaggccgtggcccgccaggccgccacgctcgactacgcgccgccgttccagatgggccatccgctgtcgttcgaagccgccaccaaggtggccgcgatcatgccgcagggactggaccgcatcttcttcacgaattccggttcggaatcggtggacaccgcgctgaagattgcgctggcctaccaccgtgcgcgcggcgagggccagcgcacccgcttcatcgggcgcgaacgcggttaccacggcgtgggctttggcggcatggctgtcggtggcatcgggccgaaccgcaaggcgttctcggccaacctgatgccgggcaccgaccatctgccggcgacgctgaatatcgccgaagcggcgttctccaagggtcagccgacatggggcgcgcaccttgccgacgaactcgagcgcatcgtcgcgctgcatgatccgtccacgattgccgccgtcatcgtggaaccgctggcgggctccgccggggtgctggtgccgccggtcggctacctcgacaagctgcgcgagatcacgaccaagcacggcatcctgctgatcttcgacgaggtcatcacggcctttggtcgcctgggtaccgccaccgcggcggaacgcttcaaggtcacgccggacctgatcaccatggccaaggccatcaacaacgccgccgtgccgatgggtgccgtggccgtgcgccgcgaagtccatgacaccgtggtcaactcggccgcgccgggcgcgatcgaactcgcgcatggctacacctactcgggccacccgctggccgccgccgctgccatcgccacgctggacctgtatcagcgcgagaacctgttcggccgtgccgcggagctgtcgccggtgttcgaagcggccgttcacagcgtacgcagcgcgccgcatgtgaaggacatccgcaacctcggcatggtggccggcatcgagctggagccgcgtccgggccagcccggcgcacgcgcctacgaagccttcctcaaatgccttgagcgtggcgtgctggtgcgctacaccggcgatatcctcgcgttctcgccgccgctgatcatcagcgaggcgcagattgccgagctgttcgatacggtcaagcaggccttgcaggaagtgcagtaa

SEQ ID NO: 86 - protein, 443 aa, Ralstonia eutropha
MDAAKTVIPDLDALWMPFTANRQYKAAPRLLASASGMYYTTHDGRQILDGCAGLWCVAAGHCRKEIAEAVARQAATLDYAPPFQMGHPLSFEAATKVAAIMPQGLDRIFFTNSGSESVDTALKIALAYHRARGEGQRTRFIGRERGYHGVGFGGMAVGGIGPNRKAFSANLMPGTDHLPATLNIAEAAFSKGQPTWGAHLADELERIVALHDPSTIAAVIVEPLAGSAGVLVPPVGYLDKLREITTKHGILLIFDEVITAFGRLGTATAAERFKVTPDLITMAKAINNAAVPMGAVAVRREVHDTVVNSAAPGAIELAHGYTYSGHPLAAAAAIATLDLYQRENLFGRAAELSPVFEAAVHSVRSAPHVKDIRNLGMVAGIELEPRPGQPGARAYEAFLKCLERGVLVRYTGDILAFSPPLIISEAQIAELFDTVKQALQEVQ

SEQ ID NO: 87 - DNA, 1341 bp, Shewanella oneidensis
atggccgactcacccaacaacctcgctcacgaacatccttcacttgaacactattggatgccttttaccgccaatcgccaattcaaagcgagccctcgtttactcgcccaagctgaaggtatgtattacacagatatcaatggcaacaaggtattagactctacagcgggcttatggtgttgtaatgctggccatggtcgccgtgagatcagtgaagccgtcagcaaacaaattcggcagatggattacgctccctccttccaaatgggccatcccatcgcttttgaactggccgaacgtttaaccgaactcagcccagaaggactcaacaaagtattctttaccaactcaggctctgagtcggttgataccgcgctaaaaatggctctttgctaccatagagccaatggccaagcgtcacgcacccgctttattggccgtgaaatgggttaccatggcgtaggatttggtgggatctcggtgggtggtttaagcaataaccgtaaagccttcagcggccagctattgcaaggcgtggatcacctgccccacaccttagacattcaacatgccgcctttagtcgtggcttaccgagcctcggtgctgaaaaagctgaggtattagaacaattagtcacactccatggcgccgaaaatattgccgccgttattgttgaacccatgtcaggttctgcaggggtaattttaccacctcaaggctacttaaaacgcttacgtgaaatcactaaaaaacacggcatcttattgattttcgatgaagtcattaccgcatttggccgtgtaggtgcagcattcgccagccaacgttggggcgttattccagacataatcaccacggctaaagccattaataatggcgccatccccatgggcgcagtgtttgtacaggattatatccacgatacttgcatgcaagggccaaccgaactgattgaatttttccacggttatacctattcgggccacccagtcgccgcagcagcagcactcgccacgctctccatctaccaaaacgagcaactgtttgagcgcagttttgagcttgagcggtatttcgaagaagccgttcatagcctcaaagggttaccgaatgtgattgatattcgcaacaccggattagtcgcgggtttccagctagcaccgaatagccaaggtgttggtaaacgcggatacagcgtgttcgagcattgtttccatcaaggcacactcgtgcgggcaacgggcgatattatcgccatgtccccaccactcattgttgagaaacatcagattgaccaaatggtaaatagccttagcgatgcaattcacgccgttggatga

SEQ ID NO: 88 - protein, 446 aa, Shewanella oneidensis
MADSPNNLAHEHPSLEHYWMPFTANRQFKASPRLLAQAEGMYYTDINGNKVLDSTAGLWCCNAGHGRREISEAVSKQIRQMDYAPSFQMGHPIAFELAERLTELSPEGLNKVFFTNSGSESVDTALKMALCYHRANGQASRTRFIGREMGYHGVGFGGISVGGLSNNRKAFSGQLLQGVDHLPHTLDIQHAAFSRGLPSLGAEKAEVLEQLVTLHGAENIAAVIVEPMSGSAGVILPPQGYLKRLREITKKHGILLIFDEVITAFGRVGAAFASQRWGVIPDIITTAKAINNGAIPMGAVFVQDYIHDTCMQGPTELIEFFHGYTYSGHPVAAAAALATLSIYQNEQLFERSFELERYFEEAVHSLKGLPNVIDIRNTGLVAGFQLAPNSQGVGKRGYSVFEHCFHQGTLVRATGDIIAMSPPLIVEKHQIDQMVNSLSDAIHAVG

SEQ ID NO: 89 - DNA, 1347 bp, Pseudomonas putida
atgaacatgcccgaaactggtcctgccggtatcgccagccagctcaagctggacgcccactggatgccctacaccgccaaccgcaacttccagcgcgacccacgcctgatcgtggcggccgaaggcaactacctggtcgatgaccacgggcgcaagatcttcgacgccctgtccggcctgtggacctgcggcgcagggcacactcgcaaggaaatcgctgacgcggtgacccgtcaactgagtacgctggactactccccagcgttccagttcggccacccgctgtcgttccagctggcggaaaagatcgccgagctggttccgggcaatctgaatcacgtcttctataccaactccggttccgagtgcgccgataccgcactgaagatggtgcgtgcctactggcgcctgaaaggccaggcaaccaagaccaagatcatcggccgtgcccgtggttaccatggcgtgaacatcgccggtaccagcctgggtggcgtcaacggtaaccgcaagatgtttggccagctgctggacgtcgaccacctgcctcacactgtattgccggtgaacgccttctcgaaaggcttgccggaagagggcggtatcgcgctggctgacgaaatgctcaagctgatcgagctgcacgatgcctccaacatcgcagcagtcatcgtcgagccgctggccggttcggccggtgtgctgccgccgccaaagggttacctgaagcgcctgcgtgaaatctgcacccagcacaacattctgctgatcttcgacgaagtgatcacaggcttcggccgcatgggcgcgatgaccggctcggaagccttcggcgttaccccggacctgatgtgcatcgccaagcaggtgaccaacggcgccatcccgatgggcgcagtgattgccagcagcgagatctaccagaccttcatgaaccagccgaccccggaatacgccgtggaattcccacacggctacacctattcggcgcacccggtagcctgtgccgccggtctcgccgcgctggacctgctgcagaaggaaaacctggtgcagtccgcggctgaactggcgccgcatttcgagaagctgctgcacggcgtgaagggcaccaagaatatcgtcgatatccgcaactacggcctggccggcgccatccagatcgccgcccgtgacggtgatgccatcgttcgcccttacgaagcggccatgaagctgtggaaagcgggcttctatgtacgctttggtggcgacaccctgcagttcggcccaaccttcaataccaagccgcaggaactggaccgcttgttcgatgctgttggcgaaaccctgaacctgatcgactga

SEQ ID NO: 90 - protein, 448 aa, Pseudomonas putida
MNMPETGPAGIASQLKLDAHWMPYTANRNFQRDPRLIVAAEGNYLVDDHGRKIFDALSGLWTCGAGHTRKEIADAVTRQLSTLDYSPAFQFGHPLSFQLAEKIAELVPGNLNHVFYTNSGSECADTALKMVRAYWRLKGQATKTKIIGRARGYHGVNIAGTSLGGVNGNRKMFGQLLDVDHLPHTVLPVNAFSKGLPEEGGIALADEMLKLIELHDASNIAAVIVEPLAGSAGVLPPPKGYLKRLREICTQHNILLIFDEVITGFGRMGAMTGSEAFGVTPDLMCIAKQVTNGAIPMGAVIASSEIYQTFMNQPTPEYAVEFPHGYTYSAHPVACAAGLAALDLLQKENLVQSAAELAPHFEKLLHGVKGTKNIVDIRNYGLAGAIQIAARDGDAIVRPYEAAMKLWKAGFYVRFGGDTLQFGPTFNTKPQELDRLFDAVGETLNLID

SEQ ID NO: 91 - DNA, 1701 bp, Streptomyces cinnamonensis
atggacgctgacgcgatcgaggaaggccgccgacgctggcaggcccgttacgacaaggcccgcaagcgcgacgcggacttcaccacgctctccggggaccccgtcgaccccgtctacggcccccggcccggggacacgtacgacgggttcgagcggatcggctggccgggggagtaccccttcacccgcgggctctacgccaccgggtaccgcggccgcacctggaccatccgccagttcgccggcttcggcaacgccgagcagacgaacgagcgctacaagatgatcctggccaacggcggcggcggcctctccgtcgccttcgacatgccgaccctcatgggccgcgactccgacgacccgcgctcgctcggcgaggtcggccactgcggtgtcgccatcgactccgccgccgacatggaggtcctcttcaaggacatcccgctcggcgacgtcacgacgtccatgaccatcagcgggcccgccgtgcccgtcttctgcatgtacctcgtcgcggccgagcgccagggcgtcgacccggccgtcctcaacggcacgctgcagaccgacatcttcaaggagtacatcgcccagaaggagtggctcttccagcccgagccgcacctgcgcctcatcggcgacctgatggagcactgcgcgcgcgacatccccgcgtacaagccgctctcggtctccggctaccacatccgcgaggccggggcgacggccgcgcaggagctcgcgtacaccctcgcggacggcttcgggtacgtggaactgggcctctcgcgcggcctggacgtggacgtcttcgcgcccggcctctccttcttcttcgacgcgcacgtcgacttcttcgaggagatcgcgaagttccgcgccgcacgccgcatctgggcgcgctggctccgggacgagtacggagcgaagaccgagaaggcacagtggctgcgcttccacacgcagaccgcgggggtctcgctcacggcccagcagccgtacaacaacgtggtgcggacggcggtggaggccctcgccgcggtgctcggcggcacgaactccctgcacaccaacgctctcgacgagacccttgccctccccagcgagcaggccgcggagatcgcgctgcgcacccagcaggtgctgatggaggagaccggcgtcgccaacgtcgcggacccgctgggcggctcctggtacatcgagcagctcaccgaccgcatcgaggccgacgccgagaagatcttcgagcagatcagggagcgggggcggcgggcctgccccgacgggcagcacccgatcgggccgatcacctccggcatcctgcgcggcatcgaggacggctggttcaccggcgagatcgccgagtccgccttccagtaccagcggtccctggagaagggcgacaagcgggtcgtcggcgtcaactgcctcgaaggctccgtcaccggcgacctggagatcctgcgcgtcagccacgaggtcgagcgcgagcaggtgcgggagcttgcggggcgcaaggggcggcgtgacgatgcgcgggtgcgggcctcgctcgacgcgatgctcgccgctgcgcgggacgggtcgaacatgattgcccccatgctggaggcggtgcgggccgaggcgaccctcggggagatctgcggggtgcttcgcgatgagtggggggtctacgtggagccgcccgggttctga

SEQ ID NO: 92 - protein, 566 aa, Streptomyces cinnamonensis
MDADAIEEGRRRWQARYDKARKRDADFTTLSGDPVDPVYGPRPGDTYDGFERIGWPGEYPFTRGLYATGYRGRTWTIRQFAGFGNAEQTNERYKMILANGGGGLSVAFDMPTLMGRDSDDPRSLGEVGHCGVAIDSAADMEVLFKDIPLGDVTTSMTISGPAVPVFCMYLVAAERQGVDPAVLNGTLQTDIFKEYIAQKEWLFQPEPHLRLIGDLMEHCARDIPAYKPLSVSGYHIREAGATAAQELAYTLADGFGYVELGLSRGLDVDVFAPGLSFFFDAHVDFFEEIAKFRAARRIWARWLRDEYGAKTEKAQWLRFHTQTAGVSLTAQQPYNNVVRTAVEALAAVLGGTNSLHTNALDETLALPSEQAAEIALRTQQVLMEETGVANVADPLGGSWYIEQLTDRIEADAEKIFEQIRERGRRACPDGQHPIGPITSGILRGIEDGWFTGEIAESAFQYQRSLEKGDKRVVGVNCLEGSVTGDLEILRVSHEVEREQVRELAGRKGRRDDARVRASLDAMLAAARDGSNMIAPMLEAVRAEATLGEICGVLRDEWGVYVEPPGF

SEQ ID NO: 93 - DNA, 411 bp, Streptomyces cinnamonensis
atgggtgtggcagccgggccgatccgcgtggtggtcgccaagccggggctcgacgggcacgatcgcggggccaaggtgatcgcgcgggcgttgcgtgacgcgggtatggaggtcatctacaccgggctgcaccagacgcccgagcaggtggtggacaccgcgatccaggaggacgccgacgcgatcggcctctccatcctctccggagcgcacaacacgctgttcgcgcgcgtgttggagctcttgaaggagcgggacgcggaggacatcaaggtgtttggtggcggcatcatcccggaggcggacatcgcgccgctgaaggagaagggcgtcgcggagatcttcacgcccggggccaccaccacgtcgatcgtggagtgggttcgggggaacgtgcgacaggccgtctga

SEQ ID NO: 94 - protein, 136 aa, Streptomyces cinnamonensis
MGVAAGPIRVVVAKPGLDGHDRGAKVIARALRDAGMEVIYTGLHQTPEQVVDTAIQEDADAIGLSILSGAHNTLFARVLELLKERDAEDIKVFGGGIIPEADIAPLKEKGVAEIFTPGATTTSIVEWVRGNVRQAV

SEQ ID NO: 95 - DNA, 1701 bp, Streptomyces coelicolor
atggacgctcatgccatagaggagggccgccttcgctggcaggcccggtacgacgcggcgcgcaagcgcgacgcggacttcaccacgctctccggagaccccgtggagccggtgtacgggccccgccccggggacgagtacgagggcttcgagcggatcggctggccgggcgagtaccccttcacccgcggcctgtatccgaccgggtaccgggggcgtacgtggaccatccggcagttcgccgggttcggcaacgccgagcagaccaacgagcgctacaagatgatcctccgcaacggcggcggcgggctctcggtcgccttcgacatgccgaccctgatgggccgcgactccgacgacccgcgctcgctgggcgaggtcgggcactgcggggtggccatcgactcggccgccgacatggaagtgctgttcaaggacatcccgctcggggacgtgacgacctccatgacgatcagcgggcccgccgtgcccgtgttctgcatgtacctcgtcgccgccgagcgccagggcgtcgacgcatccgtgctcaacggcacgctgcagaccgacatcttcaaggagtacatcgcccagaaggagtggctcttccagcccgagccccacctccggctcatcggcgacctcatggagtactgcgcggccggcatccccgcctacaagccgctctccgtctccggctaccacatccgcgaggcgggcgcgacggccgcgcaggagctggcgtacacgctcgccgacggcttcggatacgtggagctgggcctcagccgcgggctcgacgtggacgtcttcgcgcccggcctctccttcttcttcgacgcgcacctcgacttcttcgaggagatcgccaagttccgcgcggcccgcaggatctgggcccgctggatgcgcgacgtgtacggcgcgcggaccgacaaggcccagtggctgcggttccacacccagaccgccggagtctcgctcaccgcgcagcagccgtacaacaacgtcgtacgcaccgcggtggaggcgctggcggccgtgctcggcggcaccaactccctgcacaccaacgcgctcgacgagaccctcgccctgcccagcgagcaggccgccgagatcgccctgcgcacccagcaggtgctgatggaggagaccggcgtcgccaacgtcgccgacccgctgggcggttcctggttcatcgagcagctgaccgaccgcatcgaggccgacgccgagaagatcttcgagcagatcaaggagcgggggctgcgcgcccaccccgacgggcagcaccccgtcggaccgatcacctccggcctgctgcgcggcatcgaggacggctggttcaccggcgagatcgccgagtccgccttccgctaccagcagtccttggagaaggacgacaagaaggtggtcggcgtcaacgtccacaccggctccgtcaccggcgacctggagatcctgcgggtcagccacgaggtcgagcgcgagcaggtgcgggtcctgggcgagcgcaaggacgcccgggacgacgccgccgtgcgcggcgccctggacgccatgctggccgcggcccgctccggcggcaacatgatcgggccgatgctggacgcggtgcgcgcggaggcgacgctgggcgagatctgcggtgtgctgcgcgacgagtggggggtgtacacggaaccggcggggttctga

SEQ ID NO: 96 - protein, 566 aa, Streptomyces coelicolor
MDAHAIEEGRLRWQARYDAARKRDADFTTLSGDPVEPVYGPRPGDEYEGFERIGWPGEYPFTRGLYPTGYRGRTWTIRQFAGFGNAEQTNERYKMILRNGGGGLSVAFDMPTLMGRDSDDPRSLGEVGHCGVAIDSAADMEVLFKDIPLGDVTTSMTISGPAVPVFCMYLVAAERQGVDASVLNGTLQTDIFKEYIAQKEWLFQPEPHLRLIGDLMEYCAAGIPAYKPLSVSGYHIREAGATAAQELAYTLADGFGYVELGLSRGLDVDVFAPGLSFFFDAHLDFFEEIAKFRAARRIWARWMRDVYGARTDKAQWLRFHTQTAGVSLTAQQPYNNVVRTAVEALAAVLGGTNSLHTNALDETLALPSEQAAEIALRTQQVLMEETGVANVADPLGGSWFIEQLTDRIEADAEKIFEQIKERGLRAHPDGQHPVGPITSGLLRGIEDGWFTGEIAESAFRYQQSLEKDDKKVVGVNVHTGSVTGDLEILRVSHEVEREQVRVLGERKDARDDAAVRGALDAMLAAARSGGNMIGPMLDAVRAEATLGEICGVLRDEWGVYTEPAGF

SEQ ID NO: 97 - DNA, 417 bp, Streptomyces coelicolor
atgggtgtggcagccggtccgatccgcgtggtggtggccaagccggggctcgacggccacgatcgcggggccaaggtgatcgcgagggccctgcgtgacgccggtatggaggtgatctacaccgggctccaccagacgcccgagcagatcgtcgacaccgcgatccaggaggacgccgacgcgatcgggctgtccatcctctccggtgcgcacaacacgctcttcgccgccgtgatcgagctgctccgggagcgggacgccgcggacatcctggtcttcggcggcgggatcatccccgaggcggacatcgccccgctgaaggagaagggcgtcgcggagatcttcacgcccggcgccaccacggcgtccatcgtggactgggtccgggcgaacgtgcgggagcccgcgggagcatag

SEQ ID NO: 98 - protein, 138 aa, Streptomyces coelicolor
MGVAAGPIRVVVAKPGLDGHDRGAKVIARALRDAGMEVIYTGLHQTPEQIVDTAIQEDADAIGLSILSGAHNTLFAAVIELLRERDAADILVFGGGIIPEADIAPLKEKGVAEIFTPGATTASIVDWVRANVREPAGA

SEQ ID NO: 99 - DNA, 1701 bp, Streptomyces avermitilis
atggacgctgacgccatcgaggaaggccgccgacgctggcaggcccgctacgacgcctcacgcaagcgcgaggccgatttcaccacgctctccggcgatcccgtggagccggcgtacgggccccggcccggggacgcgtacgagggtttcgagcggatcggctggccgggtgagtaccccttcacgcgcggtctgtatccgaccggctaccggggccggacctggaccatccggcagttcgccgggttcggcaacgccgagcagaccaacgagcgctacaagaagatcctcgccaacggcggcggtgggctgtccgtggccttcgacatgccgacgctcatggggcgcgactccgacgaccgccgcgcgctcggcgaggtcgggcactgcggggtcgcgatcgactcggcggccgacatggaggtcctgttcaaggacatcccgctgggtgacgtgacgacgtcgatgacgatcagcgggcccgccgtgcccgtcttctgcatgtacctggtcgcggccgagcggcagggcgtcgacccctccgtcctcaacggcaccctccagaccgacatcttcaaggagtacatcgcgcagaaggagtggctcttccagcccgagccccatctgcggctcatcggcgacctgatggagcactgcgcctcgaagatccccgcgtacaagccgctgtccgtctccgggtaccacatccgggaggccggtgccacggccgcccaggagctggcgtacaccctcgccgacggtttcggatacgtggagctggggctgagccgcggcctggacgtggacgtgttcgcgcccgggctctccttcttcttcgacgcgcacgtcgacttcttcgaggagatcgccaagttccgtgcggcgcggcgcatctgggcgcgctggctgcgggacgtgtacggggcgaagtcggagaaggcgcagtggctgcgcttccacacccagaccgcgggcgtctcgctcaccgcgcagcagccgtacaacaacgtcgtacggacggccgtggaggccctcgccgcggtgctcggcgggacgaactcgctgcacaccaacgccctcgacgagaccctcgccctgccgtccgagcaggcggccgagatcgccctgcgcacccagcaggtgctgatggaggagacgggcgtcgccaacgtggccgatccgctgggcggttcctggtacgtggagcagctgaccgaccggatcgaggccgacgccgagaagatcttcgaacagatcagggagcgcgggctgcgggcccacccggacgggcggcacccgatcgggcccatcacctccggcatcctgcgcggcatcgaggacggctggttcaccggggagatcgccgagtcggccttccagtaccagcaggcgctggagaagggcgacaagcgggtcgtcggcgtcaacgtccaccacgggtccgtgacgggcgacctggagatcctgcgcgtcagccacgaggtggagcgcgagcaggtgcgggtgctgggcgagcggaagtcggggcgcgacgacacggccgtaaccgcggccctggacgcgatgctcgccgccgcgcgcgacgggtcgaacatgatcgccccgatgctggacgcggtccgcgcggaggccacgctgggcgagatctgcgatgtcctccgggaggagtggggggtctacacggagcccgccggtttctga

SEQ ID NO: 100 - protein, 566 aa, Streptomyces avermitilis
MDADAIEEGRRRWQARYDASRKREADFTTLSGDPVEPAYGPRPGDAYEGFERIGWPGEYPFTRGLYPTGYRGRTWTIRQFAGFGNAEQTNERYKKILANGGGGLSVAFDMPTLMGRDSDDRRALGEVGHCGVAIDSAADMEVLFKDIPLGDVTTSMTISGPAVPVFCMYLVAAERQGVDPSVLNGTLQTDIFKEYIAQKEWLFQPEPHLRLIGDLMEHCASKIPAYKPLSVSGYHIREAGATAAQELAYTLADGFGYVELGLSRGLDVDVFAPGLSFFFDAHVDFFEEIAKFRAARRIWARWLRDVYGAKSEKAQWLRFHTQTAGVSLTAQQPYNNVVRTAVEALAAVLGGTNSLHTNALDETLALPSEQAAEIALRTQQVLMEETGVANVADPLGGSWYVEQLTDRIEADAEKIFEQIRERGLRAHPDGRHPIGPITSGILRGIEDGWFTGEIAESAFQYQQALEKGDKRVVGVNVHHGSVTGDLEILRVSHEVEREQVRVLGERKSGRDDTAVTAALDAMLAAARDGSNMIAPMLDAVRAEATLGEICDVLREEWGVYTEPAGF

SEQ ID NO: 101 - DNA, 417 bp, Streptomyces avermitilis
atgggtgtggcagccggtccgatccgcgtggtggtggccaagccggggctcgatggccacgatcgcggggccaaggtgatcgcgcgggcgctgcgcgatgccggtatggaggtcatttacacggggctgcaccagacgccggagcagatcgtgggcacggccatccaggaggacgccgacgcgatcgggctgtcgatcctgtccggggcgcacaacacgttgttcgcggcggtcatcgatctgctcaaggagcgcgatgccgaggacatcaaggtgttcggtggcggcatcatccccgaggcggacatcgcgccgctgaaggagaagggtgtcgcggagatcttcactccgggggcgaccacggcgtcgatcgtggagtgggtgcgggcgaacgtgcggcagcctgccggggcgtag

SEQ ID NO: 102 - protein, 138 aa, Streptomyces avermitilis
MGVAAGPIRVVVAKPGLDGHDRGAKVIARALRDAGMEVIYTGLHQTPEQIVGTAIQEDADAIGLSILSGAHNTLFAAVIDLLKERDAEDIKVFGGGIIPEADIAPLKEKGVAEIFTPGATTASIVEWVRANVRQPAGA

SEQ ID NO: 103 - DNA, 1047 bp, Achromobacter xyloxidans
atgaaagctctggtttatcacggtgaccacaagatctcgcttgaagacaagcccaagcccacccttcaaaagcccacggatgtagtagtacgggttttgaagaccacgatctgcggcacggatctcggcatctacaaaggcaagaatccagaggtcgccgacgggcgcatcctgggccatgaaggggtaggcgtcatcgaggaagtgggcgagagtgtcacgcagttcaagaaaggcgacaaggtcctgatttcctgcgtcacttcttgcggctcgtgcgactactgcaagaagcagctttactcccattgccgcgacggcgggtggatcctgggttacatgatcgatggcgtgcaggccgaatacgtccgcatcccgcatgccgacaacagcctctacaagatcccccagacaattgacgacgaaatcgccgtcctgctgagcgacatcctgcccaccggccacgaaatcggcgtccagtatgggaatgtccagccgggcgatgcggtggctattgtcggcgcgggccccgtcggcatgtccgtactgttgaccgcccagttctactccccctcgaccatcatcgtgatcgacatggacgagaatcgcctccagctcgccaaggagctcggggcaacgcacaccatcaactccggcacggagaacgttgtcgaagccgtgcataggattgcggcagagggagtcgatgttgcgatcgaggcggtgggcataccggcgacttgggacatctgccaggagatcgtcaagcccggcgcgcacatcgccaacgtcggcgtgcatggcgtcaaggttgacttcgagattcagaagctctggatcaagaacctgacgatcaccacgggactggtgaacacgaacacgacgcccatgctgatgaaggtcgcctcgaccgacaagcttccgttgaagaagatgattacccatcgcttcgagctggccgagatcgagcacgcctatcaggtattcctcaatggcgccaaggagaaggcgatgaagatcatcctctcgaacgcaggcgctgcctga

SEQ ID NO: 104 - protein, 348 aa, Achromobacter xyloxidans
MKALVYHGDHKISLEDKPKPTLQKPTDVVVRVLKTTICGTDLGIYKGKNPEVADGRILGHEGVGVIEEVGESVTQFKKGDKVLISCVTSCGSCDYCKKQLYSHCRDGGWILGYMIDGVQAEYVRIPHADNSLYKIPQTIDDEIAVLLSDILPTGHEIGVQYGNVQPGDAVAIVGAGPVGMSVLLTAQFYSPSTIIVIDMDENRLQLAKELGATHTINSGTENVVEAVHRIAAEGVDVAIEAVGIPATWDICQEIVKPGAHIANVGVHGVKVDFEIQKLWIKNLTITTGLVNTNTTPMLMKVASTDKLPLKKMITHRFELAEIEHAYQVFLNGAKEKAMKIILSNAGAA

SEQ ID NO: 105 - DNA, 996 bp, Escherichia coli
atgaagcaaacagtttatatcgccagccctgagagccagcaaattcacgtctggaatctgaatcatgaaggcgcactgacgctgacacaggttgtcgatgtgccggggcaggtgcagccgatggtggtcagcccggacaaacgttatctctatgttggtgttcgccctgagtttcgcgtcctggcgtatcgtatcgccccggacgatggcgcactgacctttgccgcagagtctgcgctgccgggtagtccgacgcatatttccaccgatcaccaggggcagtttgtctttgtaggttcttacaatgcgggtaacgtgagcgtaacgcgtctggaagatggcctgccagtgggcgtcgtcgatgtggtcgaggggctggacggttgccattccgccaatatctcaccggacaaccgtacgctgtgggttccggcattaaagcaggatcgcatttgcctgtttacggtcagcgatgatggtcatctcgtggcgcaggaccctgcggaagtgaccaccgttgaaggggccggcccgcgtcatatggtattccatccaaacgaacaatatgcgtattgcgtcaatgagttaaacagctcagtggatgtctgggaactgaaagatccgcacggtaatatcgaatgtgtccagacgctggatatgatgccggaaaacttctccgacacccgttgggcggctgatattcatatcaccccggatggtcgccatttatacgcctgcgaccgtaccgccagcctgattaccgttttcagcgtttcggaagatggcagcgtgttgagtaaagaaggcttccagccaacggaaacccagccgcgcggcttcaatgttgatcacagcggcaagtatctgattgccgccgggcaaaaatctcaccacatctcggtatacgaaattgttggcgagcaggggctactgcatgaaaaaggccgctatgcggtcgggcagggaccaatgtgggtggtggttaacgcacactaa

SEQ ID NO: 106 - protein, 331 aa, Escherichia coli
MKQTVYIASPESQQIHVWNLNHEGALTLTQVVDVPGQVQPMVVSPDKRYLYVGVRPEFRVLAYRIAPDDGALTFAAESALPGSPTHISTDHQGQFVFVGSYNAGNVSVTRLEDGLPVGVVDVVEGLDGCHSANISPDNRTLWVPALKQDRICLFTVSDDGHLVAQDPAEVTTVEGAGPRHMVFHPNEQYAYCVNELNSSVDVWELKDPHGNIECVQTLDMMPENFSDTRWAADIHITPDGRHLYACDRTASLITVFSVSEDGSVLSKEGFQPTETQPRGFNVDHSGKYLIAAGQKSHHISVYEIVGEQGLLHEKGRYAVGQGPMWVVVNAH

SEQ ID NO: 107 - DNA, 768 bp, Saccharomyces cerevisiae
atggtgaaattacaaaggtttagcgaaaagaaaagcctcatacacgaattcggcaagtttatccttgaaaagcaagaatcggcgttaacgggcgacgctgatgcagtgttcaatatcgccatcagtggaggatcgatgaaccaagcgctgtacgaaagtttggtaaatgacaaaaacatttttccacatattaagtggccacaatggagaatcttcttctgtgacgaaagattggttccatttgaggatccgcaaagtaactatggtcagttcaaaaaaacagttttggacccgctagtgcatcagggcaaccaattgaacttaggccccactgtatacactatcaacgaatcattaatcggtggcggtgaaacggccaatagaaagattgccgaagaatacgcttccatgctgcctgcatcattcgacctaatcttactcggatgcggagaagatggacatacatgctcgttgtttcccggggttgaatttaattaccttgtagaagagatggaccgcaaggttttatggtgtaataattcgcccaaggcacccaaggacaggatcacctttacattagcagtagtagccgaggctaaaagtgtgtgctttctcgttaggggagctgctaaaaaggctatcatgcatgacgtgttaatcgtaaaaaatagcgaactacctagtgtgctggttaatgaaatggtcggaaccaaagtaacttggtttctcgacgacgaagctggcgccttgattcctgaaaactgctaa

SEQ ID NO: 108 - protein, 255 aa, Saccharomyces cerevisiae
MVKLQRFSEKKSLIHEFGKFILEKQESALTGDADAVFNIAISGGSMNQALYESLVNDKNIFPHIKWPQWRIFFCDERLVPFEDPQSNYGQFKKTVLDPLVHQGNQLNLGPTVYTINESLIGGGETANRKIAEEYASMLPASFDLILLGCGEDGHTCSLFPGVEFNYLVEEMDRKVLWCNNSPKAPKDRITFTLAVVAEAKSVCFLVRGAAKKAIMHDVLIVKNSELPSVLVNEMVGTKVTWFLDDEAGALIPENC

SEQ ID NO: 109 - DNA, 1713 bp, Lactococcus lactis
atggaattcaaatataacggaaaagttgaatcagtggaactcaataaatattctaagacattgactcaagatccaacacaaccagcgactcaagcgatgtactacggcattggttttaaagatgaggatttcaaaaaagctcaggtcggaatcgtcagcatggattgggacggaaatccatgtaatatgcacttgggaacacttgggagtaaaatcaaaagttctgtcaaccaaactgacggattgattggacttcaatttcatactattggagtttctgatggaattgctaacggaaagcttggcatgagatattctttggtcagtcgtgaagttattgctgacagcatcgaaaccaacgctggcgcagaatattatgatgccatcgttgccattcccggttgtgataaaaatatgcccgggtcaattatcggaatggctcgcttaaatcgtccgtcaattatggtctatggtggaacgattgaacatggcgaatataaaggtgaaaaattaaatattgtttcggcctttgaagctctggggcaaaaaatcactggaaatatttctgatgaagattatcatggcgttatttgcaatgccattccaggacaaggtgcttgcggaggaatgtacactgccaataccctggctgctgctattgaaactttgggaatgagtttaccttattcctcttccaatccagcagtcagtcaagaaaaacaagaagagtgtgatgacattggtttagccatcaaaaatttattagaaaaagatattaaaccaagtgatatcatgaccaaagaagcttttgaaaatgccataacaattgtcatggtccttggaggctcaaccaatgctgtgcttcatatcattgcaatggcaaatgccattggtgtagaaattacgcaagatgatttccaacgtatttcagatattacccctgttcttggcgatttcaaaccgagcggaaaatatatgatggaagatctgcacaaaattggtggccttcctgctgttttgaaatacctacttaaagaaggaaaacttcacggtgattgtttgaccgtcacaggtaaaactttggctgaaaatgttgaaacagcattagatttggactttgacagtcaagatattatgcgaccactaaaaaatccaattaaagctactggacatttacaaattttgtacggtaatcttgcccaagggggttctgttgcaaaaatttctggtaaagaaggcgaatttttcaaaggaacagctcgtgtttttgacggagaacaacactttatcgatggcattgagtctggccgattgcatgccggtgatgttgcggtcattagaaatattggcccagtcggaggtccgggaatgccagagatgttaaaaccaacctcagcattaattggagcaggacttggaaaatcttgtgccctaattactgacggaagattttctggtggcacacacggctttgttgtgggtcatatcgtccctgaagcagttgaaggtgggttgattggtttagttgaagatgatgatattatcgaaattgatgcggtgaataatagtattagtttaaaagtttctaatgaagaaattgctaaacgacgtgccaattatcaaaaaccaacccctaaagcaacgcgtggtgttcttgcaaaatttgccaaacttacgcgccccgctagtgaaggttgcgttacagatttatag

SEQ ID NO: 110 - protein, 570 aa, Lactococcus lactis
MEFKYNGKVESVELNKYSKTLTQDPTQPATQAMYYGIGFKDEDFKKAQVGIVSMDWDGNPCNMHLGTLGSKIKSSVNQTDGLIGLQFHTIGVSDGIANGKLGMRYSLVSREVIADSIETNAGAEYYDAIVAIPGCDKNMPGSIIGMARLNRPSIMVYGGTIEHGEYKGEKLNIVSAFEALGQKITGNISDEDYHGVICNAIPGQGACGGMYTANTLAAAIETLGMSLPYSSSNPAVSQEKQEECDDIGLAIKNLLEKDIKPSDIMTKEAFENAITIVMVLGGSTNAVLHIIAMANAIGVEITQDDFQRISDITPVLGDFKPSGKYMMEDLHKIGGLPAVLKYLLKEGKLHGDCLTVTGKTLAENVETALDLDFDSQDIMRPLKNPIKATGHLQILYGNLAQGGSVAKISGKEGEFFKGTARVFDGEQHFIDGIESGRLHAGDVAVIRNIGPVGGPGMPEMLKPTSALIGAGLGKSCALITDGRFSGGTHGFVVGHIVPEAVEGGLIGLVEDDDIIEIDAVNNSISLKVSNEEIAKRRANYQKPTPKATRGVLAKFAKLTRPASEGCVTDL

SEQ ID NO: 111 - DNA, 1020 bp, Lactobacillus plantarum
atgcaagaacgcattttattcggaacatatacgaaaaaaacaagccaagggatttaccaaggaacccttgacaccactgccaaaaccttaaccaacgatggcttactggcagccactcaaaatcccacctatttggccctctcagctaaggattgcctatacagtgtcgataaggaagatgacgagggcggtatcgctgcttggcaaatcgacgggcaaactgctcacaaactaaacaccgttgtcgcacctggcaccccaccagcttacgttgctgtcgatgaggcccggcaactcgtctacagtgccaactatcataagggaacggccgaagtcatgaaaattgctgctgatggcgcgctgactttgaccgatactgttcaacatagtggtcatggccctcgtcctgaacaagacggctcccatattcattacaccgacctcacgccagataatcgcttagccgtaatcgatttaggtagcgataaggtctatgtctataacgtcagcgacgccggtcagttaagtgaacaatccgtgctcactatggaagctggttttggaccacgtcacctcgtgttcagtccagacggccaatacgccttcttagctggtgaattatcgagtcagattgcgagcttaaaatatgacgcccaaactggtgcctttacgcagcttggcattgtgaagaccattcctgccgactacacggcgcacaacggtgccgcagccatccgcttaagtcacgacggtcattttctctacgtctccaatcgtggctacaatacgttagctgtctttgcagtaaccgccgacggtcatttgaccctgattcagcaaatcagtacggaaggtgacttcccccgtgattttgatttagatccaactgaagcctttgtcgtggtcgttaatcaaaacactgataatgccactttgtatgcacgcgacttaacgagtggtaaactaagtctattacaaaaggacgttactgtgcctgaaggcgtttgcgtccgtttctag

SEQ ID NO: 112 - protein, 339 aa, Lactobacillus plantarum
MQERILFGTYTKKTSQGIYQGTLDTTAKTLTNDGLLAATQNPTYLALSAKDCLYSVDKEDDEGGIAAWQIDGQTAHKLNTVVAPGTPPAYVAVDEARQLVYSANYHKGTAEVMKIAADGALTLTDTVQHSGHGPRPEQDGSHIHYTDLTPDNRLAVIDLGSDKVYVYNVSDAGQLSEQSVLTMEAGFGPRHLVFSPDGQYAFLAGELSSQIASLKYDAQTGAFTQLGIVKTIPADYTAHNGAAAIRLSHDGHFLYVSNRGYNTLAVFAVTADGHLTLIQQISTEGDFPRDFDLDPTEAFVVVVNQNTDNATLYARDLTSGKLSLLQKDVTVPEGVCVRF

SEQ ID NO: 113-114 - skipped (2 entries)

SEQ ID NO: 115 - DNA, 753 bp, Zymomonas mobilis
atgccgatagtccttaatgtctggcaggtatcaatggagaagaagatgaccgaagccgaatggtgggaatttgaaaatgtcgaagctatggcaaaacagattgccgacgacatcgaatttattatcaagcaagccattgagaaaaaaggccgcgctttaatcatcgttccgggtggttctacaccgaaactggttttcccgacgctcgcggctcgtgacctcgattggtcaaaagtaacgctgatgctgaccgatgaccgtctggttgccaaagataatccgttaagcaattttggccttctgaccaaacatttcggcagtagcggtgctgaactggtctccttgattgatgaaaattatctggatgaccgcgctgccgctggccgtgctgcagaccagaaactggcttcttataaatggcctgccgatctcgtttggttgggtatgggtaatgatggccataccgcttctattttcccaggtcccaatttcgacgaagctgttaacgggccccgtgaacgccgcgctcttggccttcttccggttccgttaccgccagaagcaccggttgcccgcgtaacccttagcttgtccacgctggcttctgctcatactgttatggtggttatcactggcgatcataaacgcacggttctgaccgatgctttgaaagaaggcgcttccagccgtcttccggttggccgcgttctcggtgaaaccgaagcctccatcgacgtgtactggagcaaataa

SEQ ID NO: 116 - protein, 250 aa, Zymomonas mobilis
MPIVLNVWQVSMEKKMTEAEWWEFENVEAMAKQIADDIEFIIKQAIEKKGRALIIVPGGSTPKLVFPTLAARDLDWSKVTLMLTDDRLVAKDNPLSNFGLLTKHFGSSGAELVSLIDENYLDDRAAAGRAADQKLASYKWPADLVWLGMGNDGHTASIFPGPNFDEAVNGPRERRALGLLPVPLPPEAPVARVTLSLSTLASAHTVMVVITGDHKRTVLTDALKEGASSRLPVGRVLGETEASIDVYWSK

SEQ ID NO: 117 - DNA, 1533 bp, Aspergillus niger
atggccagcacaatagcacgcactgaggaacgccagaatgctggcaccatggagctcaaagatgacactgtcatcatagtactgggtgcctccggagatcttgcaaagaagaagaccttcccggcccttttcggcctttatcgcaacaagttcctccccaagggaatcaagatcgtcggatatgcccggacaaacatggaccatgaggagtacctgaggcgtgtgcgctcatacatcaagacccctaccaaggaaatcgaagagcagctggacagcttctgccagttctgcacctacatttccggtcaatatgacaaggatgactcgttcatcaacctcaacaagcacctcgaggagattgagaagggccagaaggagcagaacagaatctactacatggccctcccccccagcgttttcaccaccgtttccgaccaacttaagcgcaactgctaccccaagaacggcgttgcccgtatcatcgtagagaagcctttcggcaaggaccttcagagctcgcgcgatctccaaaaagccctggagcctaactggaaggaagaggagatcttccgtatcgaccactacctgggtaaggagatggtcaagaacatccttatcatgcgcttcggaaacgaattcttcaacgccacctggaaccgtcaccacatcgataacgttcagatcacattcaaggagcccttcggcactgagggacgtggtggttacttcgatgaattcggcatcatccgtgatgtcatgcagaaccaccttctccaggtgttgacgctgctcgctatggagcgccccatttccttctccgccgaggacatccgtgacgagaaggttcgtgtcctccgtgcgatggacgccattgagcccaagaacgtcattattggccagtacggaaagtctctggatggcagcaagcccgcctacaaggaggacgagaccgttccccaggattcccgctgccccaccttctgcgctatggtcgcctacatcaagaacgagaggtgggacggtgttcctttcatcatgaaggctggcaaggccttgaacgagcagaagaccgagatccgtatccagttccgtgacgttacctccggaattttcaaggacatccctcgcaacgagctcgttatccgcgtccagcccaacgagtccgtgtacatcaagatgaactccaagctgcctggcctgtccatgcagacggttgtgactgagctcgacctcacctaccgccgccgcttctccgacctcaagatccccgaagcctacgagtctctgatcctggatgctctgaagggcgaccactccaacttcgtccgtgacgatgagctggatgccagctggaggatcttcacccctctcctgcactacctggatgacaacaaggagatcatccccatggaatacccctacggctcccgcggacccgccgtccttgatgacttcaccgcgtccttcggctacaagttcagcgatgctgctggctaccagtggcccttgacttccacccccaaccgtctgtaa

SEQ ID NO: 118 - protein, 510 aa, Aspergillus niger
MASTIARTEERQNAGTMELKDDTVIIVLGASGDLAKKKTFPALFGLYRNKFLPKGIKIVGYARTNMDHEEYLRRVRSYIKTPTKEIEEQLDSFCQFCTYISGQYDKDDSFINLNKHLEEIEKGQKEQNRIYYMALPPSVFTTVSDQLKRNCYPKNGVARIIVEKPFGKDLQSSRDLQKALEPNWKEEEIFRIDHYLGKEMVKNILIMRFGNEFFNATWNRHHIDNVQITFKEPFGTEGRGGYFDEFGIIRDVMQNHLLQVLTLLAMERPISFSAEDIRDEKVRVLRAMDAIEPKNVIIGQYGKSLDGSKPAYKEDETVPQDSRCPTFCAMVAYIKNERWDGVPFIMKAGKALNEQKTEIRIQFRDVTSGIFKDIPRNELVIRVQPNESVYIKMNSKLPGLSMQTVVTELDLTYRRRFSDLKIPEAYESLILDALKGDHSNFVRDDELDASWRIFTPLLHYLDDNKEIIPMEYPYGSRGPAVLDDFTASFGYKFSDAAGYQWPLTSTPNRL

SEQ ID NO: 119 - DNA, 1536 bp, Aspergillus nidulans
atgtccgccacgatagcccgcgccgaggagcagcagaatgggagcactgtcgaactcaaagatgacaccgtcattgtcgtactaggtgcctccggggatcttgcaaagaagaagactttcccagctctttttggcctttttcgcaacaagttccttcccaagggtatcaagatcgtcggatatgcccggacacagatggaccacaatgaataccttaagcgagtgcgctcatacattaagaccccgacaaaggagatcgaagagcaattgaacagcttttgcgagctttgcacatacatcagcggccaatacgaccaggatgactcattcaagaacctcgccaagcaccttgaggagattgagaaaaaccaaaaggaacagaacagagtcttttacatggcgttgccccccagcgttttcatcacagtctcagagcaactaaaacgcaactgctaccccaaaaatggtgtcgctcgtattattgtcgagaaacctttcggcaaggacctccagagctctcgtgatctccagaaggcccttgagcccaactggaaagaagaagagatcttccgtattgaccactacctcggcaaggagatggttaagaacatccttatcatgcgctttggcaacgagttcttcaatgccacctggaaccgccatcacatcgacaacgttcagatcacgttcaaggaaccattcggtacggagggccgtggaggttactttgatgaattcggcatcatccgtgacgttatgcagaaccaccttctgcaagttctcacactgcttgctatggagcgacccatctctttctccgccgaagacatccgtgacgagaaggttcgcgtcttgcgcgccatggaccccattcaacccaaggatgtcatcatcggccagtacggcagatcactagatggtagcaaacccgcatataaggaggatgatacagtgccacaggactctcgctgccccaccttctgtgcgctggtcgctcacatcaagaacgagagatgggatggtgttcctttcatcatgaaggcgggtaaagccctcaacgaacagaagaccgaaatccgtattcagttcaaggacgtcacttctggcatcttcaaggatatcccccgcaacgagcttgtcatccgtgtccaacccaacgaatctgtctacatcaagatgaactcgaaacttcctggactttccatgcagaccgtggttactgagctggatctcacctaccgtcgtcgattctccgacctcaagattcctgaagcctacgaatctttgatcttggatgctctcaaaggagaccactccaactttgtccgtgacgacgagctcgatgctagctggaggatgttcactcctctgctccactacctcgatgacaacaaggagatcatccctatggaatacccctacggttcccgcgggccctccgttcttgacgacttcaccgcttcctatggctacaagttcagtgatgctgcgggataccagtggccgttgacgcacactacgcctaacaggctgtag

SEQ ID NO: 120 - protein, 511 aa, Aspergillus nidulans
MSATIARAEEQQNGSTVELKDDTVIVVLGASGDLAKKKTFPALFGLFRNKFLPKGIKIVGYARTQMDHNEYLKRVRSYIKTPTKEIEEQLNSFCELCTYISGQYDQDDSFKNLAKHLEEIEKNQKEQNRVFYMALPPSVFITVSEQLKRNCYPKNGVARIIVEKPFGKDLQSSRDLQKALEPNWKEEEIFRIDHYLGKEMVKNILIMRFGNEFFNATWNRHHIDNVQITFKEPFGTEGRGGYFDEFGIIRDVMQNHLLQVLTLLAMERPISFSAEDIRDEKVRVLRAMDPIQPKDVIIGQYGRSLDGSKPAYKEDDTVPQDSRCPTFCALVAHIKNERWDGVPFIMKAGKALNEQKTEIRIQFKDVTSGIFKDIPRNELVIRVQPNESVYIKMNSKLPGLSMQTVVTELDLTYRRRFSDLKIPEAYESLILDALKGDHSNFVRDDELDASWRMFTPLLHYLDDNKEIIPMEYPYGSRGPSVLDDFTASYGYKFSDAAGYQWPLTHTTPNRL

SEQ ID NO: 121 - DNA, 1503 bp, Schizosaccharomyces pombe
atgagttctgcaaatttatctatcaaggaaaatggcgcaatggtcgttttcggcgcttccggtgatctatccaagaaaaagacgtttccagctcttttctctttgtttagcgaaggacgtctccccaaagatattagaatcgttggctatgcgcgctccaagattgaacatgaagactttttagatcgcattacccaaaacatcaaaattgatgaagaggattcccaggccaaagagaagcttgaggaatttaaaaagagatgctcttactatcgtggctcttacgacaagcctgaagatttcgagggcttgaactctcatttgtgtgagagggaaggcgaccgttctacccacaaccgcattttctatctcgcgttacctcccgacgttttcgtatctgtagctacaaaccttaaaaaaaaatgtgtgcccgaaaaaggtattgctcgtcttgtaatcgagaagccatttggcgtcgatttgaaatccgcccaggaactccaatcccaattagctcccctttttgatgagaaggaaatttatcgtattgatcactatttaggcaaggagatggttcaaaatttggttcatcttcgtttttgcaatcctgttatttctcatctttgggacaaaaacagtatttccagtgttcaaattacattcaaagagcctattggtacggaaggccgtggtgggtactttgactctagtactattgtccgtgatatcgtgcaaaaccaccttgtccaaattctgacccttttgaccatggaaaccccgaccactttctctgcagacgatcttcgtgacgagaaagtcaaggtattgcgtcgcactcgattgggagatctcaaagatattgttcttggtcaatatgtcaaaagcaaggacggtaaaaaacctggctaccttgatgacgagactgttcccaagggtagtaggtgtcccacttactcagctattccctgttttattgataccgaaagatggcgcggcgttcctttcttacttaaagctggtaaagccatggatattggcaaggtagagattcgtgttcagttcaaagctgctgcaaatggtttatttaaggacgcatatcataatgagctcgtaatccgtgttcagccagacgaagctatttacttcaagatgaacattaagcaacccggtcttagtgaggctcccctccttactgatttggacttgacttactctcgtagatttaagaacatgaagctccatgaagcatatgaagcattgtttttggacgcgtttgccggtgaccaatcccgttttgctcgtatcgacgaattagaatgtgcctggtctttagttgatcctcttttgaaatatatggaggaagagaaacctgtacccgagccttacgagtatggttccgatggtcccgaatgtttatactcttttttgaaaaagttcggatatatttatgattcccctgattactatgattatccagtcatgtccgttccttccgatcactaa

SEQ ID NO: 122 - protein, 475 aa, Schizosaccharomyces pombe
MLSIIVFGASGDLATKMTFPALFALYVRKIIPEDFQIIGYARSKLSQEAANKIVTAHIPIDDTVGASQKALNTFVEHYKYVPGTYDKPESFEMLNSIIAEKETAPASECTRIFYLVLPPHLFAPVSELIKSKAHPNGMVTRLIVEKPIGFDYKSADAILSDLSKHWSAKDTFKVDHFLGEDMIDGFTAIRFANSMFEPIWNREHIESVRVDFREDFGCEGRGGYFEGAGILRDVVQNHLLQLLTLLCIEEPKSQDAEDIIKCKVDFLKSLHPVSKEDIVYGQYTKSANGKVPGYRELDGVADDSEVSTFCALQLRSEAPRWKGIPIIISAGKGLDRDYFEARITFKRREGGMFPTVDSSNVLVLRVYPKEFIALKGHIKQPGFSRQIVPVTLDVKYPEAFPDTWIHKAYEVVIADAINGKHTHFISDDEVRTSWKIFDDVLDTTGDLSPLPYAFGSHHGPDATLEFFKKRNLEWD

SEQ ID NO: 123 - DNA, 1428 bp, Schizosaccharomyces pombe
atgctatccatcattgttttcggtgcatccggcgatctcgctaccaaaatgactttcccggccttgtttgccctttacgtccgcaaaattattcccgaggactttcaaatcatcggctatgcccgttccaaattgtcccaagaggccgctaacaaaatcgtcaccgcccatattcccattgacgatactgtcggtgcttctcaaaaggccttaaacacctttgtcgagcattacaagtatgtccccggtacttatgataagcccgagtcttttgagatgctaaacagcattattgctgaaaaggagactgctcccgcctccgaatgcacacgtatcttttacttggttctgcctcctcatctctttgctcccgtttccgagctaatcaagagtaaggctcatcccaatggtatggtcactcgtcttattgttgagaagcccatcggcttcgactacaagtctgccgatgccattctcagcgatctcagcaagcactggtctgccaaggatactttcaaagtcgaccatttccttggcgaggatatgattgatggattcactgcaattcgctttgcaaactccatgttcgagcccatctggaatcgtgaacacattgaaagtgttcgtgtcgactttcgtgaagactttggttgtgagggacgtggaggttattttgagggcgctggtatccttcgcgatgtcgttcaaaatcatcttttgcaactacttaccttactttgcatcgaagagccaaagtctcaagatgccgaagatatcatcaaatgcaaggttgacttcttgaaatcccttcatcccgtttccaaggaggacatcgtctatggacagtacactaaaagtgcaaatggaaaggtccccggttatcgtgaactggatggtgttgctgatgacagtgaagtttctacattctgtgctcttcaacttcgctctgaagcacctcgttggaagggtattcccatcatcatttctgccggtaaaggtttggaccgcgattactttgaagctcgtatcacttttaagcgtagggaaggaggtatgttccctaccgttgatagcagcaatgttctagtccttcgtgtttatcccaaggaattcattgccctcaagggacacattaaacaacctggtttctctcgtcaaattgttcctgtgactttggacgttaagtatcccgaagctttccctgatacatggatccataaggcctatgaagtggttattgccgatgccattaatggaaagcatacacactttattagtgatgatgaggttcgtacctcttggaaaatctttgatgatgtccttgacactacaggcgatttgtcacctcttccttatgcttttggttcccaccatggtccagatgccacactcgaatttttcaagaagcgtaatttagagtgggattaa

SEQ ID NO: 124 - DNA, 1422 bp, Schizosaccharomyces pombe
atggttacttttatggtatttggtgcatcaggcaacctcgccaacaaaaagacattccctgccctgttccatctcttcaaacgaaacctggtagatcgttcttccttttacgtacttggatatgctagaagtaagatacctatcggtgaattcagggaaagtattcgtgaatctgtgaagccagatactgaaagcaaacaggtgtttcaggacttcattgaccgagtatcttacttcagtggtcagtatgatcagagcagttcttatgtggaatttcgaaaacacctagaatcagttgaaaaaaaagcagactcttcgaaagcacttcgtatcttttatatcgccttaccaccatctgtttacgtgacagtcagttctcatatatatgagaatttatatttaccaggaaaatcgcggttagttattgaaaaaccgtttggtaaaaactatcaatcggctgttaaactcaaagaagaagttcataagcattggaaagaggaagaaatttatcggattgatcattatacagccaaagatatggttaacaattttttcacccttcgttttgcaaactcttcgtccattgacgcagttttaaatcgccattctattcaatccgtcgaaatacacatgtatgaaacgggaggctgtgaaggccgtattggttactatgatgcgaatggagtcgttcgcgacgtcgtacagaatcatttaactcaaattttttgtattgctgctatgaatgaaccgaagtctgcttctgcgagtgatgttcgtgctgaaaaggtcaatttgttgaaagctaccagaccagcatctttgaaagaaagtatgcttggtcagtatacaactagcgaagacggtaaaataccgggctacttagacttggagggagtccctaaagatagtaaagccaccacatttgctgcatccactcttcatgttgataatgatcgatggaagggcgtacccttcgtatttgtctctggtaagcggatgaaaaaaggtgaagtatatatcaagtactatttccgtctaaaagactccggaattttctccgacgtaaaacgacgtcggtacttgattcttcatgttcagccggaggagtttgtcaatttgacatgtactattaataaacccatgactactgaccttcaaccgattgacgcctatgcttcgctcaattataatgagcaatttaaagatctgatgaaggaaaaacgagatggctatgaaattttattcgaagatgcaattcgcggtgatcccactaagttcattcgttatgatgaggttgagtatgcttggaagatatgggacgaaatcctcgattctcccaaaaaacctattccctatccagctggttcagatggtcctgagggtttggaagcttatatgaaaaggcatctaggccatgaatag

SEQ ID NO: 125 - protein, 473 aa, Schizosaccharomyces pombe
MVTFMVFGASGNLANKKTFPALFHLFKRNLVDRSSFYVLGYARSKIPIGEFRESIRESVKPDTESKQVFQDFIDRVSYFSGQYDQSSSYVEFRKHLESVEKKADSSKALRIFYIALPPSVYVTVSSHIYENLYLPGKSRLVIEKPFGKNYQSAVKLKEEVHKHWKEEEIYRIDHYTAKDMVNNFFTLRFANSSSIDAVLNRHSIQSVEIHMYETGGCEGRIGYYDANGVVRDVVQNHLTQIFCIAAMNEPKSASASDVRAEKVNLLKATRPASLKESMLGQYTTSEDGKIPGYLDLEGVPKDSKATTFAASTLHVDNDRWKGVPFVFVSGKRMKKGEVYIKYYFRLKDSGIFSDVKRRRYLILHVQPEEFVNLTCTINKPMTTDLQPIDAYASLNYNEQFKDLMKEKRDGYEILFEDAIRGDPTKFIRYDEVEYAWKIWDEILDSPKKPIPYPAGSDGPEGLEAYMKRHLGHE

SEQ ID NO: 126 - protein, 500 aa, Schizosaccharomyces pombe
MSSANLSIKENGAMVVFGASGDLSKKKTFPALFSLFSEGRLPKDIRIVGYARSKIEHEDFLDRITQNIKIDEEDSQAKEKLEEFKKRCSYYRGSYDKPEDFEGLNSHLCEREGDRSTHNRIFYLALPPDVFVSVATNLKKKCVPEKGIARLVIEKPFGVDLKSAQELQSQLAPLFDEKEIYRIDHYLGKEMVQNLVHLRFCNPVISHLWDKNSISSVQITFKEPIGTEGRGGYFDSSTIVRDIVQNHLVQILTLLTMETPTTFSADDLRDEKVKVLRRTRLGDLKDIVLGQYVKSKDGKKPGYLDDETVPKGSRCPTYSAIPCFIDTERWRGVPFLLKAGKAMDIGKVEIRVQFKAAANGLFKDAYHNELVIRVQPDEAIYFKMNIKQPGLSEAPLLTDLDLTYSRRFKNMKLHEAYEALFLDAFAGDQSRFARIDELECAWSLVDPLLKYMEEEKPVPEPYEYGSDGPECLYSFLKKFGYIYDSPDYYDYPVMSVPSDH

SEQ ID NO: 127 - DNA, 1476 bp, Escherichia coli
atggcggtaacgcaaacagcccaggcctgtgacctggtcattttcggcgcgaaaggcgaccttgcgcgtcgtaaattgctgccttccctgtatcaactggaaaaagccggtcagctcaacccggacacccggattatcggcgtagggcgtgctgactgggataaagcggcatataccaaagttgtccgcgaggcgctcgaaactttcatgaaagaaaccattgatgaaggtttatgggacaccctgagtgcacgtctggatttttgtaatctcgatgtcaatgacactgctgcattcagccgtctcggcgcgatgctggatcaaaaaaatcgtatcaccattaactactttgccatgccgcccagcacttttggcgcaatttgcaaagggcttggcgaggcaaaactgaatgctaaaccggcacgcgtagtcatggagaaaccgctggggacgtcgctggcgacctcgcaggaaatcaatgatcaggttggcgaatacttcgaggagtgccaggtttaccgtatcgaccactatcttggtaaagaaacggtgctgaacctgttggcgctgcgttttgctaactccctgtttgtgaataactgggacaatcgcaccattgatcatgttgagattaccgtggcagaagaagtggggatcgaagggcgctggggctattttgataaagccggtcagatgcgcgacatgatccagaaccacctgctgcaaattctttgcatgattgcgatgtctccgccgtctgacctgagcgcagacagcatccgcgatgaaaaagtgaaagtactgaagtctctgcgccgcatcgaccgctccaacgtacgcgaaaaaaccgtacgcgggcaatatactgcgggcttcgcccagggcaaaaaagtgccgggatatctggaagaagagggcgcgaacaagagcagcaatacagaaactttcgtggcgatccgcgtcgacattgataactggcgctgggccggtgtgccattctacctgcgtactggtaaacgtctgccgaccaaatgttctgaagtcgtggtctatttcaaaacacctgaactgaatctgtttaaagaatcgtggcaggatctgccgcagaataaactgactatccgtctgcaacctgatgaaggcgtggatatccaggtactgaataaagttcctggccttgaccacaaacataacctgcaaatcaccaagctggatctgagctattcagaaacctttaatcagacgcatctggcggatgcctatgaacgtttgctgctggaaaccatgcgtggtattcaggcactgtttgtacgtcgcgacgaagtggaagaagcctggaaatgggtagactccattactgaggcgtgggcgatggacaatgatgcgccgaaaccgtatcaggccggaacctggggacccgttgcctcggtggcgatgattacccgtgatggtcgttcctggaatgagtttgagtaa

SEQ ID NO: 128 - protein, 491 aa, Escherichia coli
MAVTQTAQACDLVIFGAKGDLARRKLLPSLYQLEKAGQLNPDTRIIGVGRADWDKAAYTKVVREALETFMKETIDEGLWDTLSARLDFCNLDVNDTAAFSRLGAMLDQKNRITINYFAMPPSTFGAICKGLGEAKLNAKPARVVMEKPLGTSLATSQEINDQVGEYFEECQVYRIDHYLGKETVLNLLALRFANSLFVNNWDNRTIDHVEITVAEEVGIEGRWGYFDKAGQMRDMIQNHLLQILCMIAMSPPSDLSADSIRDEKVKVLKSLRRIDRSNVREKTVRGQYTAGFAQGKKVPGYLEEEGANKSSNTETFVAIRVDIDNWRWAGVPFYLRTGKRLPTKCSEVVVYFKTPELNLFKESWQDLPQNKLTIRLQPDEGVDIQVLNKVPGLDHKHNLQITKLDLSYSETFNQTHLADAYERLLLETMRGIQALFVRRDEVEEAWKWVDSITEAWAMDNDAPKPYQAGTWGPVASVAMITRDGRSWNEFE

SEQ ID NO: 129 - DNA, 52 bp, artificial sequence
  primer
ttggctgcagatataggaggaatttttgtaatggaattcaaatataacggaa

SEQ ID NO: 130 - DNA, 38 bp, artificial sequence
  primer
agcagacaagcccgtcctataaatctgtaacgcaacct

SEQ ID NO: 131 - DNA, 1485 bp, Lactobacillus plantarum
atgagtaacgaaaaaattgccttattcaccatctttggcggtactggtgacctcgcacagcgtaaactgtacccgtcactatttaagctctatcaaaagggctatctcaaggaccactttgccgttattgggacggctcggcgtccttggactgatgatcactatcatgaagttattagtgactccctagctgatctgaatgctgatcaggaaacggtgacgcaatttgcgagccatttttattatcaatcgcatgacgttactgatgctgaacattaccgaactttgaaaaaattatcagaaaagctggacgcccaatatggtttacaaggcaaccggatcttctacttagcaatggcaccaaacttcttcggtacgattgcccaacacttacgttccgaaaatattctgacagataacggttttaaccgcgtcattatcgaaaagccttttggtcatgattatgaaagtgccaaggaacttaacgaccaattaacggctacttttaacgaaaatcagatttatcgaattgaccactaccttggtaaagaaatgattcaaaatatcacggccattcgttttggcaataatatttgggaatcattatggaacaaccgttacatcgacaatgtccaaattacgttaagtgaaaaactgggtgtcgaagaacgggccgtttactatgataacagcggtgccttgcgggatatggtccaaaatcacattttgcaaattttgagtctgttaacaatggatcaaccagttgaattcactgaaaatgatatcgacgtggaaaaggtcaaggctttacggagcttacgaccacttaaaccagaagaagtcgcaaccaactttgtccgtggtcaatacggtgccggcgatgatgctaaagcttaccgcgacgaagataagatttcatcagattctaacaccgatactttcgtcgctggtaaagtcatgatcgataattatcggtggtccggagtgccgttttacatccggactgggaaacgcttagccgataagttcacgcgaatcgacgtggtgttcaaacggccagtcgtcaatatcttcaatcatgaagacgtccgagctaatgacgacgcagcaaccagtctcgatccaaacatcttgacaatcaacgttgaaccgactgaaggcttcgagctccgcatgaatgctaaagcaatcggccaaggcttcgcaaccaccccggtcaagttgaattattctcacgatgctgaagccacggctggtagcccagaagcttacgaacgtttgcttcacgatgccttaaatggcgacgcaaccaactttacccactggcaagaggttgccgattcgtggaaattcgttgacgtcattcaaaaatactgggatgaacatcaacccgaatttccaaactaccgccctggtacaatgggaccagatgcggccgatgaattattacgtcaagatggtcaccgctgggtctaccgcaactag

SEQ ID NO: 132 - protein, 494 aa, Lactobacillus plantarum
MSNEKIALFTIFGGTGDLAQRKLYPSLFKLYQKGYLKDHFAVIGTARRPWTDDHYHEVISDSLADLNADQETVTQFASHFYYQSHDVTDAEHYRTLKKLSEKLDAQYGLQGNRIFYLAMAPNFFGTIAQHLRSENILTDNGFNRVIIEKPFGHDYESAKELNDQLTATFNENQIYRIDHYLGKEMIQNITAIRFGNNIWESLWNNRYIDNVQITLSEKLGVEERAVYYDNSGALRDMVQNHILQILSLLTMDQPVEFTENDIDVEKVKALRSLRPLKPEEVATNFVRGQYGAGDDAKAYRDEDKISSDSNTDTFVAGKVMIDNYRWSGVPFYIRTGKRLADKFTRIDVVFKRPVVNIFNHEDVRANDDAATSLDPNILTINVEPTEGFELRMNAKAIGQGFATTPVKLNYSHDAEATAGSPEAYERLLHDALNGDATNFTHWQEVADSWKFVDVIQKYWDEHQPEFPNYRPGTMGPDAADELLRQDGHRWVYRN

SEQ ID NO: 133 - DNA, 1518 bp, Saccharomyces cerevisiae
atgagtgaaggccccgtcaaattcgaaaaaaataccgtcatatctgtctttggtgcgtcaggtgatctggcaaagaagaagacttttcccgccttatttgggcttttcagagaaggttaccttgatccatctaccaagatcttcggttatgcccggtccaaattgtccatggaggaggacctgaagtcccgtgtcctaccccacttgaaaaaacctcacggtgaagccgatgactctaaggtcgaacagttcttcaagatggtcagctacatttcgggaaattacgacacagatgaaggcttcgacgaattaagaacgcagatcgagaaattcgagaaaagtgccaacgtcgatgtcccacaccgtctcttctatctggccttgccgccaagcgtttttttgacggtggccaagcagatcaagagtcgtgtgtacgcagagaatggcatcacccgtgtaatcgtagagaaacctttcggccacgacctggcctctgccagggagctgcaaaaaaacctggggcccctctttaaagaagaagagttgtacagaattgaccattacttgggtaaagagttggtcaagaatcttttagtcttgaggttcggtaaccagtttttgaatgcctcgtggaatagagacaacattcaaagcgttcagatttcgtttaaagagaggttcggcaccgaaggccgtggcggctatttcgactctataggcataatcagagacgtgatgcagaaccatctgttacaaatcatgactctcttgactatggaaagaccggtgtcttttgacccggaatctattcgtgacgaaaaggttaaggttctaaaggccgtggcccccatcgacacggacgacgtcctcttgggccagtacggtaaatctgaggacgggtctaagcccgcctacgtggatgatgacactgtagacaaggactctaaatgtgtcacttttgcagcaatgactttcaacatcgaaaacgagcgttgggagggcgtccccatcatgatgcgtgccggtaaggctttgaatgagtccaaggtggagatcagactgcagtacaaagcggtcgcatcgggtgtcttcaaagacattccaaataacgaactggtcatcagagtgcagcccgatgccgctgtgtacctaaagtttaatgctaagacccctggtctgtcaaatgctacccaagtcacagatctgaatctaacttacgcaagcaggtaccaagacttttggattccagaggcttacgaggtgttgataagagacgccctactgggtgaccattccaactttgtcagagatgacgaattggatatcagttggggcatattcaccccattactgaagcacatagagcgtccggacggtccaacaccggaaatttacccctacggatcaagaggtccaaagggattgaaggaatatatgcaaaaacacaagtatgttatgcccgaaaagcacccttacgcttggcccgtgactaagccagaagatacgaaggataattag

SEQ ID NO: 134 - protein, 505 aa, Saccharomyces cerevisiae
MSEGPVKFEKNTVISVFGASGDLAKKKTFPALFGLFREGYLDPSTKIFGYARSKLSMEEDLKSRVLPHLKKPHGEADDSKVEQFFKMVSYISGNYDTDEGFDELRTQIEKFEKSANVDVPHRLFYLALPPSVFLTVAKQIKSRVYAENGITRVIVEKPFGHDLASARELQKNLGPLFKEEELYRIDHYLGKELVKNLLVLRFGNQFLNASWNRDNIQSVQISFKERFGTEGRGGYFDSIGIIRDVMQNHLLQIMTLLTMERPVSFDPESIRDEKVKVLKAVAPIDTDDVLLGQYGKSEDGSKPAYVDDDTVDKDSKCVTFAAMTFNIENERWEGVPIMMRAGKALNESKVEIRLQYKAVASGVFKDIPNNELVIRVQPDAAVYLKFNAKTPGLSNATQVTDLNLTYASRYQDFWIPEAYEVLIRDALLGDHSNFVRDDELDISWGIFTPLLKHIERPDGPTPEIYPYGSRGPKGLKEYMQKHKYVMPEKHPYAWPVTKPEDTKDN

SEQ ID NO: 135 - DNA, 1824 bp, Zymomonas mobilis
atgactgatctgcattcaacggtagaaaaggttaccgcgcgcgttattgaacgctcgcgggaaacccgtaaggcttatctggatttgatccagtatgagcgggaaaaaggcgtagaccgtccaaacctgtcctgtagtaaccttgctcatggctttgcggctatgaatggtgacaagccagctttgcgcgacttcaaccgcatgaatatcggcgtcgtgacttcctacaacgatatgttgtcggctcatgaaccatattatcgctatccggagcagatgaaagtatttgctcgcgaagttggcgcaacggttcaggtcgccggtggcgtgcctgctatgtgcgatggtgtgacccaaggtcagccgggcatggaagaatccctgtttagccgcgatgttatcgctttggctaccagcgtttctttgtctcatggtatgtttgaaggggctgcccttctcggtatctgtgacaagattgtccctggtctgttgatgggcgctctgcgctttggtcacctgccgaccattctggtcccatcaggcccgatgacgactggtatcccgaacaaagaaaaaatccgtatccgtcagctctatgctcagggtaaaatcggccagaaagaacttctggatatggaagcggcttgctaccatgctgaaggtacctgcaccttctatggtacggcaaacaccaaccagatggttatggaagtcctcggtcttcatatgccaggttcggcatttgttaccccgggtaccccgctccgccaggctctgacccgtgctgctgtgcatcgcgttgctgaattgggttggaagggcgacgattatcgtccgcttggtaaaatcattgacgaaaaatcaatcgtcaatgctattgttggtctgttggcaaccggtggttccaccaaccataccatgcatattccggccattgctcgtgctgctggtgttatcgttaactggaatgacttccatgatctttctgaagttgttccgttgattgcccgcatttacccgaatggcccgcgcgacatcaatgaattccagaatgcaggcggcatggcttatgtcatcaaagaactgctttctgctaatctgttgaaccgtgatgtcacgaccattgccaagggcggtatcgaagaatacgccaaggctccggcattaaatgatgctggcgaattggtctggaagccagctggcgaacctggtgatgacaccattctgcgtccggtttctaatcctttcgcaaaagatggcggtctgcgtctcttggaaggtaaccttggccgtgcaatgtacaaggccagtgcggttgatcctaaattctggaccattgaagcaccggttcgcgtcttctctgaccaagacgatgttcagaaagccttcaaggctggcgaattgaacaaagacgttatcgttgttgttcgtttccagggcccgcgcgcaaacggtatgcctgaattgcataagctgaccccggctttgggtgttctgcaggataatggctacaaagttgctttggtaactgatggtcgtatgtccggtgctaccggtaaagttccggttgctttgcatgtcagcccagaagctcttggcggtggtgccatcggtaaattacgtgatggcgatatcgtccgtatctcggttgaagaaggcaaacttgaagctttggttccagctgatgagtggaatgctcgtccgcatgctgaaaaaccggctttccgtccgggaaccggacgcgaattgtttgatatcttccgtcagaatgctgctaaagctgaagacggtgcagtcgcaatatatgcaggtgccggtatctaa

SEQ ID NO: 136 - protein, 607 aa, Zymomonas mobilis
MTDLHSTVEKVTARVIERSRETRKAYLDLIQYEREKGVDRPNLSCSNLAHGFAAMNGDKPALRDFNRMNIGVVTSYNDMLSAHEPYYRYPEQMKVFAREVGATVQVAGGVPAMCDGVTQGQPGMEESLFSRDVIALATSVSLSHGMFEGAALLGICDKIVPGLLMGALRFGHLPTILVPSGPMTTGIPNKEKIRIRQLYAQGKIGQKELLDMEAACYHAEGTCTFYGTANTNQMVMEVLGLHMPGSAFVTPGTPLRQALTRAAVHRVAELGWKGDDYRPLGKIIDEKSIVNAIVGLLATGGSTNHTMHIPAIARAAGVIVNWNDFHDLSEVVPLIARIYPNGPRDINEFQNAGGMAYVIKELLSANLLNRDVTTIAKGGIEEYAKAPALNDAGELVWKPAGEPGDDTILRPVSNPFAKDGGLRLLEGNLGRAMYKASAVDPKFWTIEAPVRVFSDQDDVQKAFKAGELNKDVIVVVRFQGPRANGMPELHKLTPALGVLQDNGYKVALVTDGRMSGATGKVPVALHVSPEALGGGAIGKLRDGDIVRISVEEGKLEALVPADEWNARPHAEKPAFRPGTGRELFDIFRQNAAKAEDGAVAIYAGAGI

SEQ ID NO: 137 - DNA, 1827 bp, Pseudomonas putida
atgcatccgcgcatccttgaggtcacccagcggctggtcgaacgcagccgcgccacccgcgaacgctacctgcaactgattcgcggcgcggccagtgaaggccccatgcgtgccagcctgcagtgcgccaacttcgcccacggcgtggccggttgcggcagcgaagacaagcagactctgcgcctgatgaacgcggccaacgtggccatcgtctcggcctacaacgacatgttgtctgcccaccagccttacttgcacttccccgagcagatcaagcaggccctgcgcgaggtcggctcggtcggccagttcgccggtggcgtgccggccatgtgcgatggggtgacccagggcgagccgggcatggagctggcgatcgccagccgtgaagtgatcgcgatgtccacggcggtagcgctgtcgcacaacatgttcgacgcggcactcatgctgggcatctgcgacaagatcgtccccggcctgatgatgggcgcgttgcgcttcggccacctgccgaccatcttcgtcccgggtgggccaatggtttccggcatctccaacaagcagaaggccgatgtgcgccagcgctatgccgaaggcaaggccagccgcgaagagctgttggagtccgagatgaattcctaccacagccccggcacctgcaccttctacggcaccgccaacaccaaccagttggtgatggaagtgatggggctgcacctgccgggcgcctcgttcgtcaacccgtacacgccgctgcgtgacgcactcaccgccgaggctgcgcagcaggtgacgcgcatgaccaaggccagcggcagcttcatgccgctgggcgaaatcgtcgacgagaaggcgctggtcaactccatcgtcgcgctgcacgctaccggcggctcgaccaaccacaccctgcacatcccggcgatcgcccaggctgcgggtatccagctgacctggcaggacatggccgacctctccgaagtggtgccgaccctgtcgcacgtctaccccaacggcaaggccgacatcaaccacttccaggctgccggcggcatggccttcctgattcgtgaactgctcgacgccggcctgctgcacgaagatgtcaacaccgtggccggccatggcctgcgccgctacacccaggaacccttcctcgacaatggcaagctggtgtggcgcgaagggccgcaacacagcctggacgaaagcatcctgcgcccggtgtcgcgaccattctcggccgaaggcggtctgcgggtgatggaaggcaacctgggccgtggcgtgatgaaagtatctgccgtcgcccccgagcaccaggtggtcgaggccccggcgcgggtgttccaggaccagcagtcgctggccgatgcgttcaaggccggtgagctggagcgtgactttgtcgcggtggtgcgcttccagggcccgcgctgcaatggcatgccggaactgcacaagctcaccccgttcctcggtgtattgcaggaccgtggctacaaggttgcgttggtcaccgacgggcgcatgtccggtgcctcgggcaagatccccgcggccatccacgtttgcccggaggcttacgacggcggcccgctggcacgggtgcgcgatggtgatatcgtgcgggtcgacggagtcgaaggcacgttgcggatcatggtgtcggccgaagaactggccagccgtgagctgccgccggcaccccagggcaacgacctggggtgtgggcgcgagctgttcggcttcatgcgcatggcgttcagcccggcagagcagggcgccagtgcctttacctcggccctggagcacctcaaatga

SEQ ID NO: 138 - protein, 608 aa, Pseudomonas putida
MHPRILEVTQRLVERSRATRERYLQLIRGAASEGPMRASLQCANFAHGVAGCGSEDKQTLRLMNAANVAIVSAYNDMLSAHQPYLHFPEQIKQALREVGSVGQFAGGVPAMCDGVTQGEPGMELAIASREVIAMSTAVALSHNMFDAALMLGICDKIVPGLMMGALRFGHLPTIFVPGGPMVSGISNKQKADVRQRYAEGKASREELLESEMNSYHSPGTCTFYGTANTNQLVMEVMGLHLPGASFVNPYTPLRDALTAEAAQQVTRMTKASGSFMPLGEIVDEKALVNSIVALHATGGSTNHTLHIPAIAQAAGIQLTWQDMADLSEVVPTLSHVYPNGKADINHFQAAGGMAFLIRELLDAGLLHEDVNTVAGHGLRRYTQEPFLDNGKLVWREGPQHSLDESILRPVSRPFSAEGGLRVMEGNLGRGVMKVSAVAPEHQVVEAPARVFQDQQSLADAFKAGELERDFVAVVRFQGPRCNGMPELHKLTPFLGVLQDRGYKVALVTDGRMSGASGKIPAAIHVCPEAYDGGPLARVRDGDIVRVDGVEGTLRIMVSAEELASRELPPAPQGNDLGCGRELFGFMRMAFSPAEQGASAFTSALEHLK

SEQ ID NO: 139 - DNA, 1812 bp, Escherichia coli
atgaatccacaattgttacgcgtaacaaatcgaatcattgaacgttcgcgcgagactcgctctgcttatctcgcccggatagaacaagcgaaaacttcgaccgttcatcgttcgcagttggcatgcggtaacctggcacacggtttcgctgcctgccagccagaagacaaagcctctttgaaaagcatgttgcgtaacaatatcgccatcatcacctcctataacgacatgctctccgcgcaccagccttatgaacactatccagaaatcattcgtaaagccctgcatgaagcgaatgcggttggtcaggttgcgggcggtgttccggcgatgtgtgatggtgtcacccaggggcaggatggaatggaattgtcgctgctaagccgcgaagtgatagcgatgtctgcggcggtggggctgtcccataacatgtttgatggtgctctgttcctcggtgtgtgcgacaagattgtcccgggtctgacgatggcagccctgtcgtttggtcatttgcctgcggtgtttgtgccgtctggaccgatggcaagcggtttgccaaataaagaaaaagtgcgtattcgccagctttatgccgaaggtaaagtggaccgcatggccttactggagtcagaagccgcgtcttaccatgcgccgggaacatgtactttctacggtactgccaacaccaaccagatggtggtggagtttatggggatgcagttgccaggctcttcttttgttcatccggattctccgctgcgcgatgctttgaccgccgcagctgcgcgtcaggttacacgcatgaccggtaatggtaatgaatggatgccgatcggtaagatgatcgatgagaaagtggtggtgaacggtatcgttgcactgctggcgaccggtggttccactaaccacaccatgcacctggtggcgatggcgcgcgcggccggtattcagattaactgggatgacttctctgacctttctgatgttgtaccgctgatggcacgtctctacccgaacggtccggccgatattaaccacttccaggcggcaggtggcgtaccggttctggtgcgtgaactgctcaaagcaggcctgctgcatgaagatgtcaatacggtggcaggttttggtctgtctcgttatacccttgaaccatggctgaataatggtgaactggactggcgggaaggggcggaaaaatcactcgacagcaatgtgatcgcttccttcgaacaacctttctctcatcatggtgggacaaaagtgttaagcggtaacctgggccgtgcggttatgaaaacctctgccgtgccggttgagaaccaggtgattgaagcgccagcggttgtttttgaaagccagcatgacgttatgccggcctttgaagcgggtttgctggaccgcgattgtgtcgttgttgtccgtcatcaggggccaaaagcgaacggaatgccagaattacataaactcatgccgccacttggtgtattattggaccggtgtttcaaaattgcgttagttaccgatggacgactctccggcgcttcaggtaaagtgccgtcagctatccacgtaacaccagaagcctacgatggcgggctgctggcaaaagtgcgcgacggggacatcattcgtgtgaatggacagacaggcgaactgacgctgctggtagacgaagcggaactggctgctcgcgaaccgcacattcctgacctgagcgcgtcacgcgtgggaacaggacgtgaattattcagcgccttgcgtgaaaaactgtccggtgccgaacagggcgcaacctgtatcactttttaa

SEQ ID NO: 140 - protein, 603 aa, Escherichia coli
MNPQLLRVTNRIIERSRETRSAYLARIEQAKTSTVHRSQLACGNLAHGFAACQPEDKASLKSMLRNNIAIITSYNDMLSAHQPYEHYPEIIRKALHEANAVGQVAGGVPAMCDGVTQGQDGMELSLLSREVIAMSAAVGLSHNMFDGALFLGVCDKIVPGLTMAALSFGHLPAVFVPSGPMASGLPNKEKVRIRQLYAEGKVDRMALLESEAASYHAPGTCTFYGTANTNQMVVEFMGMQLPGSSFVHPDSPLRDALTAAAARQVTRMTGNGNEWMPIGKMIDEKVVVNGIVALLATGGSTNHTMHLVAMARAAGIQINWDDFSDLSDVVPLMARLYPNGPADINHFQAAGGVPVLVRELLKAGLLHEDVNTVAGFGLSRYTLEPWLNNGELDWREGAEKSLDSNVIASFEQPFSHHGGTKVLSGNLGRAVMKTSAVPVENQVIEAPAVVFESQHDVMPAFEAGLLDRDCVVVVRHQGPKANGMPELHKLMPPLGVLLDRCFKIALVTDGRLSGASGKVPSAIHVTPEAYDGGLLAKVRDGDIIRVNGQTGELTLLVDEAELAAREPHIPDLSASRVGTGRELFSALREKLSGAEQGATCITF

SEQ ID NO: 141 - DNA, 53 bp, artificial sequence
  primer
cgagcccgggatataggaggaatttttgtaatggccagcacaatagcacgcac

SEQ ID NO: 142 - DNA, 5581 bp, artificial sequence
  vector
gaattcactagtcttaagtaagtcgtattggcaccactactcacaccgtgaccgacgcgcccgccagtcaagtgttcaaaagttagcgtttattaagtgcgataagtataccacaaagggcttattgacgcccgccaaagggttttgcggacattgttaataattgtattaaaagcatgctcaatctaacacttattttgcacaaacatggtatactttaaccgtaaaaactaaattttcactacgagaggatgacttattttgtcaagcctcgagcccgggatcgatggtacctcgcgaaagcttggatgttgtacaggataatgtccagaaggtcgatagaaagcgtgagaaacagcgtacagacgatttagagatgtagaggtacttttatgccgagaaaactttttgcgtgtgacagtccttaaaatatacttagagcgtaagcgaaagtagtagcgacagctattaactttcggttgcaaagctctaggatttttaatggacgcagcgcatcacacgcaaaaaggaaattggaataaatgcgaaatttgagatgttaattaaagacctttttgaggtctttttttcttagatttttggggttatttaggggagaaaacataggggggtactacgacctcccccctaggtgtccattgtccattgtccaaacaaataaataaatattgggtttttaatgttaaaaggttgttttttatgttaaagtgaaaaaaacagatgttgggaggtacagtgatagttgtagatagaaaagaagagaaaaaagttgctgttactttaagacttacaacagaagaaaatgagatattaaatagaatcaaagaaaaatataatattagcaaatcagatgcaaccggtattctaataaaaaaatatgcaaaggaggaatacggtgcattttaaacaaaaaaagatagacagcactggcatgctgcctatctatgactaaattttgttaagtgtattagcaccgttattatatcatgagcgaaaatgtaataaaagaaactgaaaacaagaaaaattcaagaggacgtaattggacatttgttttatatccagaatcagcaaaagccgagtggttagagtatttaaaagagttacacattcaatttgtagtgtctccattacatgatagggatactgatacagaaggtaggatgaaaaaagagcattatcatattctagtgatgtatgagggtaataaatcttatgaacagataaaaataattaacagaagaattgaatgcgactattccgcagattgcaggaagtgtgaaaggtcttgtgagatatatgcttcacatggacgatcctaataaatttaaatatcaaaaagaagatatgatagtttatggcggtgtagatgttgatgaattattaaagaaaacaacaacagatagatataaattaattaaagaaatgattgagtttattgatgaacaaggaatcgtagaatttaagagtttaatggattatgcaatgaagtttaaatttgatgattggttcccgcttttatgtgataactcggcgtatgttattcaagaatatataaaatcaaatcggtataaatctgaccgatagattttgaatttaggtgtcacaagacactcttttttcgcaccagcgaaaactggtttaagccgactgcgcaaaagacataatcgattcacaaaaaataggcacacgaaaaacaagttaagggatgcagtttatgcatcccttaacttacttattaaataatttatagctattgaaaagagataagaattgttcaaagctaatattgtttaaatcgtcaattcctgcatgttttaaggaattgttaaattgattttttgtaaatattttcttgtattctttgttaacccatttcataacgaaataattatacttttgtttatctttgtgtgatattcttgatttttttctacttaatctgataagtgagctattcactttaggtttaggatgaaaatattctcttggaaccatacttaatatagaaatatcaacttctgccattaaaagtaatgccaatgagcgttttgtatttaataatcttttagcaaacccgtattccacgattaaataaatctcattagctatactatcaaaaacaattttgcgtattatatccgtacttatgttataaggtatattaccatatattttataggattggtttttaggaaatttaaactgcaatatatccttgtttaaaacttggaaattatcgtgatcaacaagtttattttctgtagttttgcataatttatggtctatttcaatggcagttacgaaattacacctctttactaattcaagggtaaaatggccttttcctgagccgatttcaaagatattatcatgttcatttaatcttatatttgtcattattttatctatattatgttttgaagtaataaagttttgactgtgttttatatttttctcgttcattataaccctctttaatttggttatatgaattttgcttattaacgattcattataaccacttattttttgtttggttgataatgaactgtgctgattacaaaaatactaaaaatgcccatattttttcctccttataaaattagtataattatagcacgagctctgataaatatgaacatgatgagtgatcgttaaatttatactgcaatcggatgcgattattgaataaaagatatgagagatttatctaatttcttttttcttgtaaaaaaagaaagttcttaaaggttttatagttttggtcgtagagcacacggtttaacgacttaattacgaagtaaataagtctagtgtgttagactttatgaaatctatatacgtttatatatatttattatccggatctgcatcgcaggatgctgctggctaccctgtggaacacctacatctgtattaacgaagcgctggcattgaccctgagtgatttttctctggtcccgccgcatccataccgccagttgtttaccctcacaacgttccagtaaccgggcatgttcatcatcagtaacccgtatcgtgagcatcctctctcgtttcatcggtatcattacccccatgaacagaaattcccccttacacggaggcatcaagtgaccaaacaggaaaaaaccgcccttaacatggcccgctttatcagaagccagacattaacgcttctggagaaactcaacgagctggacgcggatgaacaggcagacatctgtgaatcgcttcacgaccacgctgatgagctttaccgcagctgcctcgcgcgtttcggtgatgacggtgaaaacctctgacacatgcagctcccggagacggtcacagcttgtctgtaagcggatgccgggagcagacaagcccgtcagggcgcgtcagcgggtgttggcgggtgtcggggcgcagccatgacccagtcacgtagcgatagcggagtgtatactggcttaactatgcggcatcagagcagattgtactgagagtgcaccatatgcggtgtgaaataccgcacagatgcgtaaggagaaaataccgcatcaggcgctcttccgcttcctcgctcactgactcgctgcgctcggtcgttcggctgcggcgagcggtatcagctcactcaaaggcggtaatacggttatccacagaatcaggggataacgcaggaaagaacatgtgagcaaaaggccagcaaaaggccaggaaccgtaaaaaggccgcgttgctggcgtttttccataggctccgcccccctgacgagcatcacaaaaatcgacgctcaagtcagaggtggcgaaacccgacaggactataaagataccaggcgtttccccctggaagctccctcgtgcgctctcctgttccgaccctgccgcttaccggatacctgtccgcctttctcccttcgggaagcgtggcgctttctcaatgctcacgctgtaggtatctcagttcggtgtaggtcgttcgctccaagctgggctgtgtgcacgaaccccccgttcagcccgaccgctgcgccttatccggtaactatcgtcttgagtccaacccggtaagacacgacttatcgccactggcagcagccactggtaacaggattagcagagcgaggtatgtaggcggtgctacagagttcttgaagtggtggcctaactacggctacactagaaggacagtatttggtatctgcgctctgctgaagccagttaccttcggaaaaagagttggtagctcttgatccggcaaacaaaccaccgctggtagcggtggtttttttgtttgcaagcagcagattacgcgcagaaaaaaaggatctcaagaagatcctttgatcttttctacggggtctgacgctcagtggaacgaaaactcacgttaagggattttggtcatgagattatcaaaaaggatcttcacctagatccttttaaattaaaaatgaagttttaaatcaatctaaagtatatatgagtaaacttggtctgacagttaccaatgcttaatcagtgaggcacctatctcagcgatctgtctatttcgttcatccatagttgcctgactccccgtcgtgtagataactacgatacgggagggcttaccatctggccccagtgctgcaatgataccgcgagacccacgctcaccggctccagatttatcagcaataaaccagccagccggaagggccgagcgcagaagtggtcctgcaactttatccgcctccatccagtctattaattgttgccgggaagctagagtaagtagttcgccagttaatagtttgcgcaacgttgttgccattgctgcaggcatcgtggtgtcacgctcgtcgtttggtatggcttcattcagctccggttcccaacgatcaaggcgagttacatgatcccccatgttgtgcaaaaaagcggttagctccttcggtcctccgatcgttgtcagaagtaagttggccgcagtgttatcactcatggttatggcagcactgcataattctcttactgtcatgccatccgtaagatgcttttctgtgactggtgagtactcaaccaagtcattctgagaatagtgtatgcggcgaccgagttgctcttgcccggcgtcaacacgggataataccgcgccacatagcagaactttaaaagtgctcatcattggaaaacgttcttcggggcgaaaactctcaaggatcttaccgctgttgagatccagttcgatgtaacccactcgtgcacccaactgatcttcagcatcttttactttcaccagcgtttctgggtgagcaaaaacaggaaggcaaaatgccgcaaaaaagggaataagggcgacacggaaatgttgaatactcatactcttcctttttcaatattattgaagcatttatcagggttattgtctcatgagcggatacatatttgaatgtatttagaaaaataaacaaataggggttccgcgcacatttccccgaaaagtgccacctgacgtctaagaaaccattattatcatgacattaacctataaaaataggcgtatcacgaggccctttcgtcttcaa

SEQ ID NO: 143 - DNA, 1407 bp, Escherichia coli
atgtccaagcaacagatcggcgtagtcggtatggcagtgatgggacgcaaccttgcgctcaacatcgaaagccgtggttataccgtctctattttcaaccgttcccgtgagaagacggaagaagtgattgccgaaaatccaggcaagaaactggttccttactatacggtgaaagagtttgtcgaatctctggaaacgcctcgtcgcatcctgttaatggtgaaagcaggtgcaggcacggatgctgctattgattccctcaaaccatatctcgataaaggagacatcatcattgatggtggtaacaccttcttccaggacactattcgtcgtaatcgtgagctttcagcagagggctttaacttcatcggtaccggtgtttctggcggtgaagagggggcgctgaaaggtccttctattatgcctggtggccagaaagaagcctatgaattggtagcaccgatcctgaccaaaatcgccgccgtagctgaagacggtgaaccatgcgttacctatattggtgccgatggcgcaggtcactatgtgaagatggttcacaacggtattgaatacggcgatatgcagctgattgctgaagcctattctctgcttaaaggtggcctgaacctcaccaacgaagaactggcgcagacctttaccgagtggaataacggtgaactgagcagttacctgatcgacatcaccaaagatatcttcaccaaaaaagatgaagacggtaactacctggttgatgtgatcctggatgaagcggctaacaaaggtaccggtaaatggaccagccagagcgcgctggatctcggcgaaccgctgtcgctgattaccgagtctgtgtttgcacgttatatctcttctctgaaagatcagcgtgttgccgcatctaaagttctctctggtccgcaagcacagccagcaggcgacaaggctgagttcatcgaaaaagttcgtcgtgcgctgtatctgggcaaaatcgtttcttacgcccagggcttctctcagctgcgtgctgcgtctgaagagtacaactgggatctgaactacggcgaaatcgcgaagattttccgtgctggctgcatcatccgtgcgcagttcctgcagaaaatcaccgatgcttatgccgaaaatccacagatcgctaacctgttgctggctccgtacttcaagcaaattgccgatgactaccagcaggcgctgcgtgatgtcgttgcttatgcagtacagaacggtattccggttccgaccttctccgcagcggttgcctattacgacagctaccgtgctgctgttctgcctgcgaacctgatccaggcacagcgtgactattttggtgcgcatacttataagcgtattgataaagaaggtgtgttccataccgaatggctggattaa

SEQ ID NO: 144 - protein, 468 aa, Escherichia coli
MSKQQIGVVGMAVMGRNLALNIESRGYTVSIFNRSREKTEEVIAENPGKKLVPYYTVKEFVESLETPRRILLMVKAGAGTDAAIDSLKPYLDKGDIIIDGGNTFFQDTIRRNRELSAEGFNFIGTGVSGGEEGALKGPSIMPGGQKEAYELVAPILTKIAAVAEDGEPCVTYIGADGAGHYVKMVHNGIEYGDMQLIAEAYSLLKGGLNLTNEELAQTFTEWNNGELSSYLIDITKDIFTKKDEDGNYLVDVILDEAANKGTGKWTSQSALDLGEPLSLITESVFARYISSLKDQRVAASKVLSGPQAQPAGDKAEFIEKVRRALYLGKIVSYAQGFSQLRAASEEYNWDLNYGEIAKIFRAGCIIRAQFLQKITDAYAENPQIANLLLAPYFKQIADDYQQALRDVVAYAVQNGIPVPTFSAAVAYYDSYRAAVLPANLIQAQRDYFGAHTYKRIDKEGVFHTEWLD

SEQ ID NO: 145 - DNA, 38 bp, artificial sequence
  Primer
ataggacgggcttgtctaagtcgtattggcaccactac

SEQ ID NO: 146 - DNA, 72 bp, artificial sequence
  primer
agcagacaagcccgtcgtcgacgcggccgcttaattaagagctcggatccgcttgacaaaataagtcatcct

SEQ ID NO: 147 - DNA, 1479 bp, Saccharomyces cerevisiae
atgtcaaaggcagtaggtgatttaggcttagttggtttagccgtgatgggtcaaaatttgatcttaaacgcagcggatcacggatttaccgtggttgcttataataggacgcaatcaaaggtagataggtttctagctaatgaggcaaaaggaaaatcaataattggtgcaacttcaattgaggacttggttgcgaaactaaagaaacctagaaagattatgcttttaatcaaagccggtgctccggtcgacactttaataaaggaacttgtaccacatcttgataaaggcgacattattatcgacggtggtaactcacatttcccggacactaacagacgctacgaagagctaacaaagcaaggaattctttttgtgggctctggtgtctcaggcggtgaagatggtgcacgttttggtccatctttaatgcctggtgggtcagcagaagcatggccgcacatcaagaacatctttcaatctattgccgccaaatcaaacggtgagccatgctgcgaatgggtggggcctgccggttctggtcactatgtgaagatggtacacaacggtatcgagtacggtgatatgcagttgatttgcgaggcttacgatatcatgaaacgaattggccggtttacggataaagagatcagtgaagtatttgacaagtggaacactggagttttggattctttcttgattgaaatcacgagggacattttaaaattcgatgacgtcgacggtaagccattggtggaaaaaattatggatactgccggtcaaaagggtactggtaaatggactgcaatcaacgccttggatttaggaatgccagtcactttaattggggaggctgttttcgctcgttgtttgtcagccataaaggacgaacgtaaaagagcttcgaaacttctggcaggaccaacagtaccaaaggatgcaatacatgatagagaacaatttgtgtatgatttggaacaagcattatacgcttcaaagattatttcatatgctcaaggtttcatgctgatccgcgaagctgccagatcatacggctggaaattaaacaacccagctattgctctaatgtggagaggtggctgtataatcagatctgtgttcttagctgagattacgaaggcttatagggacgatccagatttggaaaatttattattcaacgagttcttcgcttctgcagttactaaggcccaatccggttggagaagaactattgcccttgctgctacttacggtattccaactccagctttctctactgctttagcgttttacgacggctatagatctgagaggctaccagcaaacttgttacaagcgcaacgtgattattttggcgctcatacatttagaattttacctgaatgtgcttctgcccatttgccagtagacaaggatattcatatcaattggactgggcacggaggtaatatatcttcctcaacctaccaagcttaa

SEQ ID NO: 148 - protein, 492 aa, Saccharomyces cerevisiae
MSKAVGDLGLVGLAVMGQNLILNAADHGFTVVAYNRTQSKVDRFLANEAKGKSIIGATSIEDLVAKLKKPRKIMLLIKAGAPVDTLIKELVPHLDKGDIIIDGGNSHFPDTNRRYEELTKQGILFVGSGVSGGEDGARFGPSLMPGGSAEAWPHIKNIFQSIAAKSNGEPCCEWVGPAGSGHYVKMVHNGIEYGDMQLICEAYDIMKRIGRFTDKEISEVFDKWNTGVLDSFLIEITRDILKFDDVDGKPLVEKIMDTAGQKGTGKWTAINALDLGMPVTLIGEAVFARCLSAIKDERKRASKLLAGPTVPKDAIHDREQFVYDLEQALYASKIISYAQGFMLIREAARSYGWKLNNPAIALMWRGGCIIRSVFLAEITKAYRDDPDLENLLFNEFFASAVTKAQSGWRRTIALAATYGIPTPAFSTALAFYDGYRSERLPANLLQAQRDYFGAHTFRILPECASAHLPVDKDIHINWTGHGGNISSSTYQA

SEQ ID NO: 149 - DNA, 1470 bp, Saccharomyces cerevisiae
atgtctgctgatttcggtttgattggtttggccgtcatgggtcaaaatttgatcttgaacgctgctgaccacggtttcactgtttgtgcttacaacagaactcaatccaaggtcgaccatttcttggccaatgaagctaagggcaaatctatcatcggtgctacttccattgaagatttcatctccaaattgaagagacctagaaaggtcatgcttttggttaaagctggtgctccagttgacgctttgatcaaccaaatcgtcccacttttggaaaagggtgatattatcatcgatggtggtaactctcacttcccagattctaatagacgttacgaagaattgaagaagaagggtattcttttcgttggttctggtgtctccggtggtgaggaaggtgcccgttacggtccatctttgatgccaggtggttctgaagaagcttggccacatattaagaacatcttccaatccatctctgctaaatccgacggtgaaccatgttgcgaatgggttggcccagccggtgctggtcactacgtcaagatggttcacaacggtattgaatacggtgatatgcaattgatttgtgaagcttatgacatcatgaagagattgggtgggtttaccgataaggaaatcagtgacgtttttgccaaatggaacaatggtgtcttggattccttcttggtcgaaattaccagagatattttgaaattcgacgacgtcgacggtaagccattagttgaaaaaatcatggatactgctggtcaaaagggtactggtaagtggactgccatcaacgccttggatttgggtatgccagttactttgattggtgaagctgtctttgcccgttgtctatctgctttgaagaacgagagaattagagcctccaaggtcttaccaggcccagaagttccaaaagacgccgtcaaggacagagaacaatttgtcgatgatttggaacaagctttgtatgcttccaagattatttcttacgctcaaggtttcatgttgatccgtgaagctgctgctacttatggctggaaactaaacaaccctgccatcgctttgatgtggagaggtggttgtatcattagatctgttttcttgggtcaaatcacaaaggcctacagagaagaaccagatttggaaaacttgttgttcaacaagttcttcgctgatgccgtcaccaaggctcaatctggttggagaaagtcaattgcgttggctaccacctacggtatcccaacaccagccttttccaccgctttgtctttctacgatgggtacagatctgaaagattgccagccaacttactacaagctcaacgtgactactttggtgctcacactttcagagtgttgccagaatgtgcttctgacaacttgccagtagacaaggatatccatatcaactggactggccacggtggtaatgtttcttcctctacataccaagcttaa

SEQ ID NO: 150 - protein, 489 aa, Saccharomyces cerevisiae
MSADFGLIGLAVMGQNLILNAADHGFTVCAYNRTQSKVDHFLANEAKGKSIIGATSIEDFISKLKRPRKVMLLVKAGAPVDALINQIVPLLEKGDIIIDGGNSHFPDSNRRYEELKKKGILFVGSGVSGGEEGARYGPSLMPGGSEEAWPHIKNIFQSISAKSDGEPCCEWVGPAGAGHYVKMVHNGIEYGDMQLICEAYDIMKRLGGFTDKEISDVFAKWNNGVLDSFLVEITRDILKFDDVDGKPLVEKIMDTAGQKGTGKWTAINALDLGMPVTLIGEAVFARCLSALKNERIRASKVLPGPEVPKDAVKDREQFVDDLEQALYASKIISYAQGFMLIREAAATYGWKLNNPAIALMWRGGCIIRSVFLGQITKAYREEPDLENLLFNKFFADAVTKAQSGWRKSIALATTYGIPTPAFSTALSFYDGYRSERLPANLLQAQRDYFGAHTFRVLPECASDNLPVDKDIHINWTGHGGNVSSSTYQA

SEQ ID NO: 151 - DNA, 897 bp, Lactobacillus plantarum
atgaaattaggattgattggcttaggtaaaatgggaatgaacttagcgttgaacatgcaggataacgggcacacgccagtgggaatggatcttaaccccactaatcttagtaccgccagtgctcacgggttggcgacggccacggatctcaccaatttgcttgaccagttgccaacaccacggatcgtgtggatcatggtacccgctggtaaggcaaccaacagcgttatcgaacagttagcccagactttaagtgcaggtgacatcgtcctcgatggcggtaattcgcactatcaagatagtatccgccacggcgaattactggcaagtcaccacatcaacttcttagacgtcgggacgtcgggcggtcaagctggtgcacgccacgacggcaattttatgattggtggcgacctcgccactttccaagtcgtcgaaccactatttaaagcgattgccgctcccgatgggtatttgtacaccggccctgttggcagtggtcattacctgaagatggtccacaacggaattgagtatggtatgatggcagcaataggtgaaggctttgacgttttacagcatagtcagttcacttacgacaacgcggccgtcgccaaaatgtggaataacggctcagtcattcgcagctggttaatgggcttagctcaagatgcattcagcaaggatggtaatctagatgacatcaagggtgttatgcattcatccggtgaaggtcgctggaccttagacacggccctagaccaacaagtcgccaccccggtcattgcgatggccttgatgatgcgctaccgttcagaaaccgatgacacattcactggtaaagttgttgccgccctacgtaacgagtttggtggccacgctgtcgatcacgaatag

SEQ ID NO: 152 - protein, 298 aa, Lactobacillus plantarum
MKLGLIGLGKMGMNLALNMQDNGHTPVGMDLNPTNLSTASAHGLATATDLTNLLDQLPTPRIVWIMVPAGKATNSVIEQLAQTLSAGDIVLDGGNSHYQDSIRHGELLASHHINFLDVGTSGGQAGARHDGNFMIGGDLATFQVVEPLFKAIAAPDGYLYTGPVGSGHYLKMVHNGIEYGMMAAIGEGFDVLQHSQFTYDNAAVAKMWNNGSVIRSWLMGLAQDAFSKDGNLDDIKGVMHSSGEGRWTLDTALDQQVATPVIAMALMMRYRSETDDTFTGKVVAALRNEFGGHAVDHE

SEQ ID NO: 153 - DNA, 1437 bp, Lactobacillus plantarum
atgagtaatgaaaaaccacaaattggtgtcattgggatggccgtcatgggtaagaacctggcgttgaacatcgaaagccgcggctacaaggttgcgatttttaatcggactggtgccaaaactgaaaaggtcgttaaggaccatgctgacaagcaattagtaccaagttataagatcgaagacttcgtggcttcacttgaaacgccacgacggattatcatgatggttaaggctggtaagccaaccgatgccgttatcgatgaattattaccactattagataaaggcgacgtcttgattgatggtgggaacaccaactttaatgacacgatggcacgtaacgcccgcttagataaatccggaatcaactttattggtatgggtgtttccggtggtgaattaggtgccttacaaggtccttcattgatgcctggtggtcaaaaggaagcttatgatttagttgccccaatcttggaaaagatttctgctaaagcgcctcaagacggtgcaccatgtgtgacttacatcggcccgaacggtgctggtcactacgttaagatggtccacaacgggattgaatacggtgatgaagagttaatcgatgaatcatacaatatcatgcgcaacgtcgcgggcttgtccgttgatgaaatgtccgatatttttacggactggaacaaaggcgaattgagcagttacttgatcgaaatcaccgctgacattttgtcacgtaaggatgatttaggtgcggataagactaagccaatcgttgacatgatcttagaccgtgggaacaacaaaggaactggtaagtggagttccgaagatgccttgaacgttcaagtgccacaatccgttattacggaagcggtctatgcgcgttacatctcaatgatgaagaacgaacgggttgccgcttctaagaaattagctggcccaaccgctgacgttgacttgccagccaaggaagaattggttgagaagattcgtcaagccctctacttcagtaagattatgagttatgcgcaaggcttcgaacaacttcgtttcgcttctgaacattatggttgggacttgaagttcggtgaacttgcccaaatctggcgtgctggttgtatcatccgggcccaattcttacaaaacatcacggatgcttttgataagaagcctgatttaaataacttattgatggacgactactttgccgacatcgccgccaagtatcaacaatcaacacgtgaagtgcttagcttagcaatccaagctggtgtaccggtaccatcatttagtgcggcattgtcatactacgactcataccgggccgaagtgttacctgctaacttgttgcaagcgcaacgggactactttggtgcgcatacgtatgaacggactgaccgtgaagggttataccattacagttggtacgaagaacaataa

SEQ ID NO: 154 - protein, 478 aa, Lactobacillus plantarum
MSNEKPQIGVIGMAVMGKNLALNIESRGYKVAIFNRTGAKTEKVVKDHADKQLVPSYKIEDFVASLETPRRIIMMVKAGKPTDAVIDELLPLLDKGDVLIDGGNTNFNDTMARNARLDKSGINFIGMGVSGGELGALQGPSLMPGGQKEAYDLVAPILEKISAKAPQDGAPCVTYIGPNGAGHYVKMVHNGIEYGDEELIDESYNIMRNVAGLSVDEMSDIFTDWNKGELSSYLIEITADILSRKDDLGADKTKPIVDMILDRGNNKGTGKWSSEDALNVQVPQSVITEAVYARYISMMKNERVAASKKLAGPTADVDLPAKEELVEKIRQALYFSKIMSYAQGFEQLRFASEHYGWDLKFGELAQIWRAGCIIRAQFLQNITDAFDKKPDLNNLLMDDYFADIAAKYQQSTREVLSLAIQAGVPVPSFSAALSYYDSYRAEVLPANLLQAQRDYFGAHTYERTDREGLYHYSWYEEQ

SEQ ID NO: 155 - DNA, 1650 bp, Escherichia coli
atgaaaaacatcaatccaacgcagaccgctgcctggcaggcactacagaaacacttcgatgaaatgaaagacgttacgatcgccgatctttttgctaaagacggcgatcgtttttctaagttctccgcaaccttcgacgatcagatgctggtggattactccaaaaaccgcatcactgaagagacgctggcgaaattacaggatctggcgaaagagtgcgatctggcgggcgcgattaagtcgatgttctctggcgagaagatcaaccgcactgaaaaccgcgccgtgctgcacgtagcgctgcgtaaccgtagcaataccccgattttggttgatggcaaagacgtaatgccggaagtcaacgcggtgctggagaagatgaaaaccttctcagaagcgattatttccggtgagtggaaaggttataccggcaaagcaatcactgacgtagtgaacatcgggatcggcggttctgacctcggcccatacatggtgaccgaagctctgcgtccgtacaaaaaccacctgaacatgcactttgtttctaacgtcgatgggactcacatcgcggaagtgctgaaaaaagtaaacccggaaaccacgctgttcttggtagcatctaaaaccttcaccactcaggaaactatgaccaacgcccatagcgcgcgtgactggttcctgaaagcggcaggtgatgaaaaacacgttgcaaaacactttgcggcgctttccaccaatgccaaagccgttggcgagtttggtattgatactgccaacatgttcgagttctgggactgggttggcggccgttactctttgtggtcagcgattggcctgtcgattgttctctccatcggctttgataacttcgttgaactgctttccggcgcacacgcgatggacaagcatttctccaccacgcctgccgagaaaaacctgcctgtactgctggcgctgattggcatctggtacaacaatttctttggtgcggaaactgaagcgattctgccgtatgaccagtatatgcaccgtttcgcggcgtacttccagcagggcaatatggagtccaacggtaagtatgttgaccgtaacggtaacgttgtggattaccagactggcccgattatctggggtgaaccaggcactaacggtcagcacgcgttctaccagctgatccaccagggaaccaaaatggtaccgtgcgatttcatcgctccggctatcacccataacccgctctctgatcatcaccagaaactgctgtctaacttcttcgcccagaccgaagcgctggcgtttggtaaatcccgcgaagtggttgagcaggaatatcgtgatcagggtaaagatccggcaacgcttgactacgtggtgccgttcaaagtattcgaaggtaaccgcccgaccaactccatcctgctgcgtgaaatcactccgttcagcctgggtgcgttgattgcgctgtatgagcacaaaatctttactcagggcgtgatcctgaacatcttcaccttcgaccagtggggcgtggaactgggtaaacagctggcgaaccgtattctgccagagctgaaagatgataaagaaatcagcagccacgatagctcgaccaatggtctgattaaccgctataaagcgtggcgcggttaa

SEQ ID NO: 156 - protein, 549 aa, Escherichia coli
MKNINPTQTAAWQALQKHFDEMKDVTIADLFAKDGDRFSKFSATFDDQMLVDYSKNRITEETLAKLQDLAKECDLAGAIKSMFSGEKINRTENRAVLHVALRNRSNTPILVDGKDVMPEVNAVLEKMKTFSEAIISGEWKGYTGKAITDVVNIGIGGSDLGPYMVTEALRPYKNHLNMHFVSNVDGTHIAEVLKKVNPETTLFLVASKTFTTQETMTNAHSARDWFLKAAGDEKHVAKHFAALSTNAKAVGEFGIDTANMFEFWDWVGGRYSLWSAIGLSIVLSIGFDNFVELLSGAHAMDKHFSTTPAEKNLPVLLALIGIWYNNFFGAETEAILPYDQYMHRFAAYFQQGNMESNGKYVDRNGNVVDYQTGPIIWGEPGTNGQHAFYQLIHQGTKMVPCDFIAPAITHNPLSDHHQKLLSNFFAQTEALAFGKSREVVEQEYRDQGKDPATLDYVVPFKVFEGNRPTNSILLREITPFSLGALIALYEHKIFTQGVILNIFTFDQWGVELGKQLANRILPELKDDKEISSHDSSTNGLINRYKAWRG

SEQ ID NO: 157 - DNA, 3748 bp, artificial sequence
  vector
gacgaaagggccttataacttacaaataacccctcgaaaacattgaaagaataacccccaagatctatattatagatcttgggggttatttgttttaatattaaagaaatgacttcttctatttgtcatcaatactaaacaataatttgtacaaagtgattatttcttctagttcttcacgcgatacatgatcgacaatagtttcatcagtgacatgtcttgcccgtaaatctaaggctatggtttgatctaataatacttttccatatactgtttgactactagttagtcgatgatacattggaaaattacgcttggtactgctaattggagccacaatcgtcatgttacttgtctgacagactagatcattgcttagcgcaatggctggtcgcttattcatctgttcatgaccacggcttggattaaagttaacataaaatatatcaccttggcttaccattgaagttcattaccttctgactttccccaatcaagctcgtgatcccttttcccgtcatctttccaatccttaaatagttcgtgaatattggttgggttcttttttattggtgttaaaacaattgatccattttcaatggttattgtcatatcttggttatcatctaatttcagttgtttaataatttggctaggaattctagcagctttcgagtttccccactttgctaagcgtgtttgttctttaataagttccatattttcccctcctaaattattattacaagtcaagtatatcccatgtagatacacaatgcaaatattcttactggagaaataacaccttaagtctagcaccacccgcacgcatagcggtgcttaaaccatcaagggtcaagcccttaggctctctcaaacagttatcctaatcgtgaataactgcgcttcttttgcagtataaagagagaactctttatcagacaatttaagctcaaccagcccttgcactaactattattagagttggttttagcagcaacccgaataatctgcgttaatagttagcctgtccgtatcatttcctagtcttccagccacgtctttagtcgcgttgatctcgacaaggtttagcatacctatgttgttaactgcaagcggggtcacgaacgacactcacgggaggttttactagctaagaacaggtttccagcctttagttgctttgatggttgctaaccattgaataacaaaaaaacggttgctatcaggtttctgttaagattcccgataacaaccgtttactttaagtatcaatggttgaaaaacttagcctacatgttataatagtaccaagttagatagcttgtattggtagtacttgctatcgaaaatcttatcaggttgtgctgataagtcgtgaatcctaactctgctaagttgagggttcttttttttgcgttcatttattaagttgagtacattataaccgtaatataagattaatacaacctttatcattttaacgtctcaaccagccgaataatccttaaaaaaggattgattctaatgaagaaagcagacaagtaagcctcctaaattcactttagataaaaatttaggaggcatatcaaatgaactttaataaaattgatttagacaattggaagagaaaagagatatttaatcattatttgaaccaacaaacgacttttagtataaccacagaaattgatattagtgttttataccgaaacataaaacaagaaggatataaattttaccctgcatttattttcttagtgacaagggtgataaactcaaatacagcttttagaactggttacaatagcgacggagagttaggttattgggataagttagagccactttatacaatttttgatggtgtatctaaaacattctctggtatttggactcctgtaaagaatgacttcaaagagttttatgatttatacctttctgatgtagagaaatataatggttcggggaaattgtttcccaaaacacctatacctgaaaatgctttttctctttctattattccatggacttcatttactgggtttaacttaaatatcaataataatagtaattaccttctacccattattacagcaggaaaattcattaataaaggtaattcaatatatttaccgctatctttacaggtacatcattctgtttgtgatggttatcatgcaggattgtttatgaactctattcaggaattgtcagataggcctaatgactggcttttataagggcccgcgctagcggagtgtatactggcttactatgttggcactgatgagggtgtcagtgaagtgcttcatgtggcaggagaaaaaaggctgcaccggtgcgtcagcagaatatgtgatacaggatatattccgcttcctcgctcactgactcgctacgctcggtcgttcgactgcggcgagcggaaatggcttacgaacggggcggagatttcctggaagatgccaggaagatacttaacagggaagtgagagggccgcggcaaagccgtttttccataggctccgcccccctgacaagcatcacgaaatctgacgctcaaatcagtggtggcgaaacccgacaggactataaagataccaggcgtttccccctggcggctccctcgtgcgctctcctgttcctgcctttcggtttaccggtgtcattccgctgttatggccgcgtttgtctcattccacgcctgacactcagttccgggtaggcagttcgctccaagctggactgtatgcacgaaccccccgttcagtccgaccgctgcgccttatccggtaactatcgtcttgagtccaacccggaaagacatgcaaaagcaccactggcagcagccactggtaattgatttagaggagttagtcttgaagtcatgcgccggttaaggctaaactgaaaggacaagttttggtgactgcgctcctccaagccagttacctcggttcaaagagttggtagctcagagaaccttcgaaaaaccgccctgcaaggcggttttttcgttttcagagcaagagattacgcgcagaccaaaacgatctcaagaagatcatcttattaatcagataaaatatttctagatttcagtgcaatttatctcttcaaatgtagcacctgaagtcagccccatacgatataagttgtctcgaggaccgagcgcagcgagtcagtgagcgaggaagcggaagagcgagggcggagttgttgacagccgaggtaccatgtggtataatcccgagtgtggaattgtgagcggataacaatttcacacaggaaacagctatgaccatgattacgccaagcttggctgcaggtcgacggatccccgggaattcactggccgtcgttttacaacgtcgtgactgggaaaaccctggcgttacccaacttaatcgccttgcagcacatccccctttcgccagctggcgtaatagcgaagaggcccgcaccgatcgcccttcccaacagttgcgcagcctgaatggcgaatggcgcctgatgcggtattttctccttacgcatctgtgcggtatttcacaccgcatatggtgcactctcagtacaatctgctctgatgccgcatagttaagccagccccgacacccgccaacacccgctgacgcgccctgacgggcttgtctgctcccggcatccgcttacagacaagctgtgaccgtctccgggagctgcatgtgtcagaggttttcaccgtcatcaccgaaacgcgcga

SEQ ID NO: 158 - DNA, 31 bp, artificial sequence
  primer
tggtggtaccatgacatcaagggtgttatgc

SEQ ID NO: 159 - DNA, 1665 bp, Saccharomyces cerevisiae
atgtccaataactcattcactaacttcaaactggccactgaattgccagcctggtctaagttgcaaaaaatttatgaatctcaaggtaagactttgtctgtcaagcaagaattccaaaaagatgccaagcgttttgaaaaattgaacaagactttcaccaactatgatggttccaaaatcttgttcgactactcaaagaacttggtcaacgatgaaatcattgctgcattgattgaactggccaaggaggctaacgtcaccggtttgagagatgctatgttcaaaggtgaacacatcaactccactgaagatcgtgctgtctaccacgtcgcattgagaaacagagctaacaagccaatgtacgttgatggtgtcaacgttgctccagaagtcgactctgtcttgaagcacatgaaggagttctctgaacaagttcgttctggtgaatggaagggttataccggtaagaagatcaccgatgttgttaacatcggtattggtggttccgatttgggtccagtcatggtcactgaggctttgaagcactacgctggtgtcttggatgtccacttcgtttccaacattgacggtactcacattgctgaaaccttgaaggttgttgacccagaaactactttgtttttgattgcttccaagactttcactaccgctgaaactatcactaacgctaacactgccaagaactggttcttgtcgaagacaggtaatgatccatctcacattgctaagcatttcgctgctttgtccactaacgaaaccgaagttgccaagttcggtattgacaccaaaaacatgtttggtttcgaaagttgggtcggtggtcgttactctgtctggtcggctattggtttgtctgttgccttgtacattggctatgacaactttgaggctttcttgaagggtgctgaagccgtcgacaaccacttcacccaaaccccattggaagacaacattccattgttgggtggtttgttgtctgtctggtacaacaacttctttggtgctcaaacccatttggttgctccattcgaccaatacttgcacagattcccagcctacttgcaacaattgtcaatggaatctaacggtaagtctgttaccagaggtaacgtgtttactgactactctactggttctatcttgtttggtgaaccagctaccaacgctcaacactctttcttccaattggttcaccaaggtaccaagttgattccatctgatttcatcttagctgctcaatctcataacccaattgagaacaaattacatcaaaagatgttggcttcaaacttctttgctcaagctgaagctttaatggttggtaaggatgaagaacaagttaaggctgaaggtgccactggtggtttggtcccacacaaggtcttctcaggtaacagaccaactacctctatcttggctcaaaagattactccagctactttgggtgctttgattgcctactacgaacatgttactttcactgaaggtgccatttggaatatcaactctttcgaccaatggggtgttgaattgggtaaagtcttggctaaagtcatcggcaaggaattggacaactcctccaccatttctacccacgatgcttctaccaacggtttaatcaatcaattcaaggaatggatgtga

SEQ ID NO: 160 - protein, 554 aa, Saccharomyces cerevisiae
MSNNSFTNFKLATELPAWSKLQKIYESQGKTLSVKQEFQKDAKRFEKLNKTFTNYDGSKILFDYSKNLVNDEIIAALIELAKEANVTGLRDAMFKGEHINSTEDRAVYHVALRNRANKPMYVDGVNVAPEVDSVLKHMKEFSEQVRSGEWKGYTGKKITDVVNIGIGGSDLGPVMVTEALKHYAGVLDVHFVSNIDGTHIAETLKVVDPETTLFLIASKTFTTAETITNANTAKNWFLSKTGNDPSHIAKHFAALSTNETEVAKFGIDTKNMFGFESWVGGRYSVWSAIGLSVALYIGYDNFEAFLKGAEAVDNHFTQTPLEDNIPLLGGLLSVWYNNFFGAQTHLVAPFDQYLHRFPAYLQQLSMESNGKSVTRGNVFTDYSTGSILFGEPATNAQHSFFQLVHQGTKLIPSDFILAAQSHNPIENKLHQKMLASNFFAQAEALMVGKDEEQVKAEGATGGLVPHKVFSGNRPTTSILAQKITPATLGALIAYYEHVTFTEGAIWNINSFDQWGVELGKVLAKVIGKELDNSSTISTHDASTNGLINQFKEWM

SEQ ID NO: 161 - DNA, 1353 bp, Lactobacillus plantarum
atggcacacatttcatttgacagctctaatttaactaagttcgtccataataacgaacttggcgaaatgcaagctatggtcacagctgctgataaggagctgcgtgaaggaaccggcgccggtaatgatttccgtggctggttaaatttaccaacagattacgataaggaagaatttgcacggattaaaaccgctgcaaagaagattcaagacgattcagacgtcctcgttgtaatcgggattggtggttcatacctcggtgcacgggcagccattgaattcttacacgaaactttctggtcatcactttcacgtgaagaccgtaaattcccacaagttgtctttgctgggaactcaatctcatcttcatacgtcaacgacttaattcacttaatcggcgaccgtgacttctctgttaacatcatttcgaagtcagggactacgacggaaccttcaattgcattccgggtcttcaaggaacgtttaatcgcgaagtatggtgaagaagctgctaagggccggatctatgccacaactgaccgcaagcgcggtgcgttgaagcaagaagctgacgctgaaggctacgaaacctttgttattcctgatgatgttggtggtcgtttcactgttttgacaccagttggtttgttaccaattgcggtatcaggcggcgacatcgattcattaatgaagggtgctgcggatgcccaaaatgaatacaaagatgccgatttatctaagaacgaagcttaccaatacgctgcttaccggaacatcttgtaccggaagggctacaccactgaaattcttgaaaactacgaaccaaacatggcgatgttctcagaatggtggaagcaattaatgggtgaatctgaagggaaagaccaaaaggggatctacccatcatcagctaactttacgactgacttacactcattgggtcaatatatccaagaaggccgtcgtaacttgatggaaacggtcgttaaagttgacaacgctactagtgatgttgacattcctaaggaaaccgaaaaccttgatgggttgaagtatcttgaaggcaagacgatggctcaagttaacaccaaagctttcgaaggggttattatggcccacgttgatggcggtgttcctaacatggtcgttaacattccttcacaggatgcctatacgttaggttacacgatgtacttctttgaagctgcagttgccatttctggttacttgaacgggatcaacccattcaaccaacctggtgttgaagcttacaagaacaacatgttcgccttacttggcaagcctggttacgaagaattaactaagaagttaaccgcacgtcttagtgactaa

SEQ ID NO: 162 - protein, 450 aa, Lactobacillus plantarum
MAHISFDSSNLTKFVHNNELGEMQAMVTAADKELREGTGAGNDFRGWLNLPTDYDKEEFARIKTAAKKIQDDSDVLVVIGIGGSYLGARAAIEFLHETFWSSLSREDRKFPQVVFAGNSISSSYVNDLIHLIGDRDFSVNIISKSGTTTEPSIAFRVFKERLIAKYGEEAAKGRIYATTDRKRGALKQEADAEGYETFVIPDDVGGRFTVLTPVGLLPIAVSGGDIDSLMKGAADAQNEYKDADLSKNEAYQYAAYRNILYRKGYTTEILENYEPNMAMFSEWWKQLMGESEGKDQKGIYPSSANFTTDLHSLGQYIQEGRRNLMETVVKVDNATSDVDIPKETENLDGLKYLEGKTMAQVNTKAFEGVIMAHVDGGVPNMVVNIPSQDAYTLGYTMYFFEAAVAISGYLNGINPFNQPGVEAYKNNMFALLGKPGYEELTKKLTARLSD

SEQ ID NO: 163 - DNA, 930 bp, Escherichia coli
atggtacgtatctatacgttgacacttgcgccctctctcgatagcgcaacaattaccccgcaaatttatcccgaaggaaaactgcgctgtaccgcaccggtgttcgaacccgggggcggcggcatcaacgtcgcccgcgccattgcccatcttggaggcagtgccacagcgatcttcccggcgggtggcgcgaccggcgaacacctggtttcactgttggcggatgaaaatgtccccgtcgctactgtagaagccaaagactggacccggcagaatttacacgtacatgtggaagcaagcggtgagcagtatcgttttgttatgccaggcgcggcattaaatgaagatgagtttcgccagcttgaagagcaagttctggaaattgaatccggggccatcctggtcataagcggaagcctgccgccaggtgtgaagctggaaaaattaacccaactgatttccgctgcgcaaaaacaagggatccgctgcatcgtcgacagttctggcgaagcgttaagtgcagcactggcaattggtaacatcgagttggttaagcctaaccaaaaagaactcagtgcgctggtgaatcgcgaactcacccagccggacgatgtccgcaaagccgcgcaggaaatcgttaatagcggcaaggccaaacgggttgtcgtttccctgggtccacaaggagcgctgggtgttgatagtgaaaactgtattcaggtggtgccaccaccggtgaaaagccagagtaccgttggcgctggtgacagcatggtcggcgcgatgacactgaaactggcagaaaatgcctctcttgaagagatggttcgttttggcgtagctgcggggagtgcagccacactcaatcagggaacacgtctgtgctcccatgacgatacgcaaaaaatttacgcttacctttcccgctaa

SEQ ID NO: 164 - protein, 309 aa, Escherichia coli
MVRIYTLTLAPSLDSATITPQIYPEGKLRCTAPVFEPGGGGINVARAIAHLGGSATAIFPAGGATGEHLVSLLADENVPVATVEAKDWTRQNLHVHVEASGEQYRFVMPGAALNEDEFRQLEEQVLEIESGAILVISGSLPPGVKLEKLTQLISAAQKQGIRCIVDSSGEALSAALAIGNIELVKPNQKELSALVNRELTQPDDVRKAAQEIVNSGKAKRVVVSLGPQGALGVDSENCIQVVPPPVKSQSTVGAGDSMVGAMTLKLAENASLEEMVRFGVAAGSAATLNQGTRLCSHDDTQKIYAYLSR

SEQ ID NO: 165 - DNA, 963 bp, Escherichia coli
atgattaagaaaatcggtgtgttgacaagcggcggtgatgcgccaggcatgaacgccgcaattcgcggggttgttcgttctgcgctgacagaaggtctggaagtaatgggtatttatgacggctatctgggtctgtatgaagaccgtatggtacagctagaccgttacagcgtgtctgacatgatcaaccgtggcggtacgttcctcggttctgcgcgtttcccggaattccgcgacgagaacatccgcgccgtggctatcgaaaacctgaaaaaacgtggtatcgacgcgctggtggttatcggcggtgacggttcctacatgggtgcaatgcgtctgaccgaaatgggcttcccgtgcatcggtctgccgggcactatcgacaacgacatcaaaggcactgactacactatcggtttcttcactgcgctgagcaccgttgtagaagcgatcgaccgtctgcgtgacacctcttcttctcaccagcgtatttccgtggtggaagtgatgggccgttattgtggagatctgacgttggctgcggccattgccggtggctgtgaattcgttgtggttccggaagttgaattcagccgtgaagacctggtaaacgaaatcaaagcgggtatcgcgaaaggtaaaaaacacgcgatcgtggcgattaccgaacatatgtgtgatgttgacgaactggcgcatttcatcgagaaagaaaccggtcgtgaaacccgcgcaactgtgctgggccacatccagcgcggtggttctccggtgccttacgaccgtattctggcttcccgtatgggcgcttacgctatcgatctgctgctggcaggttacggcggtcgttgtgtaggtatccagaacgaacagctggttcaccacgacatcatcgacgctatcgaaaacatgaagcgtccgttcaaaggtgactggctggactgcgcgaaaaaactgtattaa

SEQ ID NO: 166 - protein, 320 aa, Escherichia coli
MIKKIGVLTSGGDAPGMNAAIRGVVRSALTEGLEVMGIYDGYLGLYEDRMVQLDRYSVSDMINRGGTFLGSARFPEFRDENIRAVAIENLKKRGIDALVVIGGDGSYMGAMRLTEMGFPCIGLPGTIDNDIKGTDYTIGFFTALSTVVEAIDRLRDTSSSHQRISVVEVMGRYCGDLTLAAAIAGGCEFVVVPEVEFSREDLVNEIKAGIAKGKKHAIVAITEHMCDVDELAHFIEKETGRETRATVLGHIQRGGSPVPYDRILASRMGAYAIDLLLAGYGGRCVGIQNEQLVHHDIIDAIENMKRPFKGDWLDCAKKLY

SEQ ID NO: 167 - DNA, 22 bp, artificial sequence
  primer
aagattatcatcgcaacaggtc

SEQ ID NO: 168 - DNA, 21 bp, artificial sequence
  primer
ccgcgggcatccgcattccag

SEQ ID NO: 169 - DNA, 21 bp, artificial sequence
  primer
ttggaaaacgttcttcggggc

SEQ ID NO: 170 - DNA, 22 bp, artificial sequence
  primer
ctgtttctcacgctttctatcg

SEQ ID NO: 171 - DNA, 2964 bp, Saccharomyces cerevisiae
atgcaatctcaagattcatgctacggtgttgcattcagatctatcatcacaaatgatgaagctttattcaagaagaccattcacttttatcacactctaggatttgcaactgtgaaagatttcaacaaattcaaacatggtgaaaatagcttactatcttcagggacttcccaagattccttgagagaagtttggttagaatctttcaagttgagtgaggttgatgcttctgggttccgtataccacaacaagaagctactaacaaggctcaaagtcaaggtgctctattaaagattcgtttagtgatgtctgctccaatcgatgaaactttcgacaccaacgaaaccgccacaatcacttatttctctactgatttgaacaagattgtcgagaaattcccaaaacaagccgaaaaattgtccgataccttagtgtttttgaaagatccaatgggcaacaacatcaccttctcaggcttagctaatgcaaccgattccgctccaacttccaaagatgctttcttagaagctacctccgaagacgaaatcatctctagagcttcttccgatgcttctgacttactaagacaaacattgggctcttctcaaaagaagaagaagattgctgtcatgacttctggtggtgattctccaggtatgaatgccgctgttcgtgccgttgttcgtacaggtatacatttcggctgtgatgtttttgctgtttacgaaggttacgaaggtttactaagaggcggtaaatatttaaagaaaatggcttgggaagatgtcagaggttggttaagtgaaggtggtactttgattggtactgctcgttctatggaattcagaaagcgtgagggtcgtagacaagctgcaggcaatttaatttcgcaaggtattgacgctttggttgtttgtggtggtgatggttctttaaccggtgctgatcttttcagacacgaatggccatctttggttgatgaattggttgcagaaggtagattcactaaagaagaagtcgccccatacaagaatttgtccattgttggtcttgtcggttccatcgataatgatatgtctggtactgactctaccattggtgcttattctgctttggaaagaatctgtgaaatggttgactacattgatgccaccgctaaatcccactcccgtgcctttgttgttgaagttatgggtagacattgtggttggttggccttgatggctggtattgctaccggtgccgattacatttttattccagaaagagctgttcctcacggaaaatggcaggacgaattgaaggaagtgtgccaaagacacagaagtaagggtagaagaaataacacaattattgtcgctgaaggtgctttagatgatcaattaaaccctgttactgccaatgacgtcaaagatgctttgattgaattgggtctagacaccaaggtaaccattctaggtcacgttcaaagaggtggtacagctgttgctcatgacagatggttagctactctacaaggtgtcgatgctgttaaggccgttctggaatttacccctgaaactccttctccattaattggtattttagaaaacaagataattagaatgccattggttgaatctgtgaagttgactaaatctgttgccactgccattgaaaacaaagatttcgataaggcaatttctttaagagacacagaatttattgaactttacgaaaacttcttatccactaccgttaaagatgatggttccgaattattgccagtatctgacagactaaacattggtattgtccatgttggtgccccatctgctgctttgaacgctgccacccgtgccgcaactctatactgtttgtctcacggccataaaccatacgctatcatgaatggtttcagtggattgattcaaaccggtgaagtgaaggaactatcatggattgatgtcgaaaactggcataacttgggtggttccgaaatcggtacgaacagatctgttgcttcagaagatttgggtaccattgcttactacttccaaaagaacaagctagacggtttgattattcttggtggttttgaaggtttcaggtccttgaagcaattgcgtgacggtagaacccaacacccaatctttaacattccaatgtgtttgattccagccactgtttctaacaacgttccaggtactgaatactcacttggtgttgatacctgtttgaacgcattagtcaattacactgatgacatcaaacagagtgcttctgcgacaagaagaagagtcttcgtctgtgaagtccaaggtggtcactctggttacatcgcttctttcactggtttaatcactggtgctgtttcagtgtacactccagaaaagaagatcgacttagcttctatcagagaagatataactctattaaaagagaactttcgtcacgacaaaggtgaaaacagaaacggtaagctattggttagaaacgaacaagcttctagcgtatatagcactcaattgttggctgacatcatctctgaagcaagcaagggtaagtttggtgttagaactgctatcccaggccatgttcaacaaggtggtgttccatcttctaaagaccgtgtcaccgcttccagatttgctgtcaaatgtatcaagtttatcgaacaatggaacaagaaaaatgaagcttctccaaacactgacgctaaggttttgagattcaagttcgatactcacggtgaaaaggtaccaactgttgagcacgaagatgactctgctgctgttatctgtgttaatggttctcacgtttccttcaagccaattgctaacctttgggaaaacgaaaccaacgttgaattaagaaagggttttgaagttcactgggctgaatacaacaagattggtgacatcctgtccggtagattaaagttgagagctgaggtagccgctttagccgctgaaaacaaatga

SEQ ID NO: 172 - protein, 987 aa, Saccharomyces cerevisiae
MQSQDSCYGVAFRSIITNDEALFKKTIHFYHTLGFATVKDFNKFKHGENSLLSSGTSQDSLREVWLESFKLSEVDASGFRIPQQEATNKAQSQGALLKIRLVMSAPIDETFDTNETATITYFSTDLNKIVEKFPKQAEKLSDTLVFLKDPMGNNITFSGLANATDSAPTSKDAFLEATSEDEIISRASSDASDLLRQTLGSSQKKKKIAVMTSGGDSPGMNAAVRAVVRTGIHFGCDVFAVYEGYEGLLRGGKYLKKMAWEDVRGWLSEGGTLIGTARSMEFRKREGRRQAAGNLISQGIDALVVCGGDGSLTGADLFRHEWPSLVDELVAEGRFTKEEVAPYKNLSIVGLVGSIDNDMSGTDSTIGAYSALERICEMVDYIDATAKSHSRAFVVEVMGRHCGWLALMAGIATGADYIFIPERAVPHGKWQDELKEVCQRHRSKGRRNNTIIVAEGALDDQLNPVTANDVKDALIELGLDTKVTILGHVQRGGTAVAHDRWLATLQGVDAVKAVLEFTPETPSPLIGILENKIIRMPLVESVKLTKSVATAIENKDFDKAISLRDTEFIELYENFLSTTVKDDGSELLPVSDRLNIGIVHVGAPSAALNAATRAATLYCLSHGHKPYAIMNGFSGLIQTGEVKELSWIDVENWHNLGGSEIGTNRSVASEDLGTIAYYFQKNKLDGLIILGGFEGFRSLKQLRDGRTQHPIFNIPMCLIPATVSNNVPGTEYSLGVDTCLNALVNYTDDIKQSASATRRRVFVCEVQGGHSGYIASFTGLITGAVSVYTPEKKIDLASIREDITLLKENFRHDKGENRNGKLLVRNEQASSVYSTQLLADIISEASKGKFGVRTAIPGHVQQGGVPSSKDRVTASRFAVKCIKFIEQWNKKNEASPNTDAKVLRFKFDTHGEKVPTVEHEDDSAAVICVNGSHVSFKPIANLWENETNVELRKGFEVHWAEYNKIGDILSGRLKLRAEVAALAAENK

SEQ ID NO: 173 - DNA, 2880 bp, Saccharomyces cerevisiae
atgactgttactactccttttgtgaatggtacttcttattgtaccgtcactgcatattccgttcaatcttataaagctgccatagatttttacaccaagtttttgtcattagaaaaccgctcttctccagatgaaaactccactttattgtctaacgattccatctctttgaagatccttctacgtcctgatgaaaaaatcaataaaaatgttgaggctcatttgaaggaattgaacagtattaccaagactcaagactggagatcacatgccacccaatccttggtatttaacacttccgacatcttggcagtcaaggacactctaaatgctatgaacgctcctcttcaaggctacccaacagaactatttccaatgcagttgtacactttggacccattaggtaacgttgttggtgttacttctactaagaacgcagtttcaaccaagccaactccaccaccagcaccagaagcttctgctgagtctggtctttcctctaaagttcactcttacactgatttggcttaccgtatgaaaaccaccgacacctatccatctctgccaaagccattgaacaggcctcaaaaggcaattgccgtcatgacttccggtggtgatgctccaggtatgaactctaacgttagagccatcgtgcgttccgctatcttcaaaggttgtcgtgcctttgttgtcatggaaggttatgaaggtttggttcgtggtggtccagaatacatcaaggaattccactgggaagacgtccgtggttggtctgctgaaggtggtaccaacattggtactgcccgttgtatggaattcaagaagcgcgaaggtagattattgggtgcccaacatttgattgaggccggtgtcgatgctttgatcgtttgtggtggtgacggttctttgactggtgctgatctgtttagatcagaatggccttctttgatcgaggaattgttgaaaacaaacagaatttccaacgaacaatacgaaagaatgaagcatttgaatatttgcggtactgtcggttctattgataacgatatgtccaccacggatgctactattggtgcttactctgccttggacagaatctgtaaggccatcgattacgttgaagccactgccaactctcactcaagagctttcgttgttgaagttatgggtagaaactgtggttggttagctttattagctggtatcgccacttccgctgactatatctttattccagagaagccagccacttccagcgaatggcaagatcaaatgtgtgacattgtctccaagcacagatcaaggggtaagagaaccaccattgttgttgttgcagaaggtgctatcgctgctgacttgaccccaatttctccaagcgacgtccacaaagttctagttgacagattaggtttggatacaagaattactaccttaggtcacgttcaaagaggtggtactgctgttgcttacgaccgtatcttggctactttacaaggtcttgaggccgttaatgccgttttggaatccactccagacaccccatcaccattgattgctgttaacgaaaacaaaattgttcgtaaaccattaatggaatccgtcaagttgaccaaagcagttgcagaagccattcaagctaaggatttcaagagagctatgtctttaagagacactgagttcattgaacatttaaacaatttcatggctatcaactctgctgaccacaacgaaccaaagctaccaaaggacaagagactgaagattgccattgttaatgtcggtgctccagctggtggtatcaactctgccgtctactcgatggctacttactgtatgtcccaaggtcacagaccatacgctatctacaatggttggtctggtttggcaagacatgaaagtgttcgttctttgaactggaaggatatgttgggttggcaatcccgtggtggttctgaaatcggtactaacagagtcactccagaagaagcagatctaggtatgattgcttactatttccaaaagtacgaatttgatggtttgatcatcgttggtggtttcgaagcttttgaatctttacatcaattagagagagcaagagaaagttatccagctttcagaatcccaatggtcttgataccagctactttgtctaacaatgttccaggtactgaatactctttgggttctgataccgctttgaatgctctaatggaatactgtgatgttgttaaacaatccgcttcttcaaccagaggtagagccttcgttgtcgattgtcaaggtggtaactcaggctatttggccacttacgcttctttggctgttggtgctcaagtctcttatgtcccagaagaaggtatttctttggagcaattgtccgaggatattgaatacttagctcaatcttttgaaaaggcagaaggtagaggtagatttggtaaattgattttgaagagtacaaacgcttctaaggctttatcagccactaaattggctgaagttattactgctgaagccgatggcagatttgacgctaagccagcttatccaggtcatgtacaacaaggtggtttgccatctccaattgatagaacaagagccactagaatggccattaaagctgtcggcttcatcaaagacaaccaagctgccattgctgaagctcgtgctgccgaagaaaacttcaacgctgatgacaagaccatttctgacactgctgctgtcgttggtgttaagggttcacatgtcgtttacaactccattagacaattgtatgactatgaaactgaagtttccatgagaatgccaaaggtcattcactggcaagctaccagactcattgctgaccatttggttggaagaaagagagttgattaa

SEQ ID NO: 174 - protein, 959 aa, Saccharomyces cerevisiae
MTVTTPFVNGTSYCTVTAYSVQSYKAAIDFYTKFLSLENRSSPDENSTLLSNDSISLKILLRPDEKINKNVEAHLKELNSITKTQDWRSHATQSLVFNTSDILAVKDTLNAMNAPLQGYPTELFPMQLYTLDPLGNVVGVTSTKNAVSTKPTPPPAPEASAESGLSSKVHSYTDLAYRMKTTDTYPSLPKPLNRPQKAIAVMTSGGDAPGMNSNVRAIVRSAIFKGCRAFVVMEGYEGLVRGGPEYIKEFHWEDVRGWSAEGGTNIGTARCMEFKKREGRLLGAQHLIEAGVDALIVCGGDGSLTGADLFRSEWPSLIEELLKTNRISNEQYERMKHLNICGTVGSIDNDMSTTDATIGAYSALDRICKAIDYVEATANSHSRAFVVEVMGRNCGWLALLAGIATSADYIFIPEKPATSSEWQDQMCDIVSKHRSRGKRTTIVVVAEGAIAADLTPISPSDVHKVLVDRLGLDTRITTLGHVQRGGTAVAYDRILATLQGLEAVNAVLESTPDTPSPLIAVNENKIVRKPLMESVKLTKAVAEAIQAKDFKRAMSLRDTEFIEHLNNFMAINSADHNEPKLPKDKRLKIAIVNVGAPAGGINSAVYSMATYCMSQGHRPYAIYNGWSGLARHESVRSLNWKDMLGWQSRGGSEIGTNRVTPEEADLGMIAYYFQKYEFDGLIIVGGFEAFESLHQLERARESYPAFRIPMVLIPATLSNNVPGTEYSLGSDTALNALMEYCDVVKQSASSTRGRAFVVDCQGGNSGYLATYASLAVGAQVSYVPEEGISLEQLSEDIEYLAQSFEKAEGRGRFGKLILKSTNASKALSATKLAEVITAEADGRFDAKPAYPGHVQQGGLPSPIDRTRATRMAIKAVGFIKDNQAAIAEARAAEENFNADDKTISDTAAVVGVKGSHVVYNSIRQLYDYETEVSMRMPKVIHWQATRLIADHLVGRKRVD

SEQ ID NO: 175 - DNA, 963 bp, Lactobacillus plantarum
atgaaacgcattggtattttaaccagtggcggcgacgctcctggtatgaatgcggccgttcgtgcagttgctggtaaagcaatggctgaagggttggaagcatacggcatcaattacggctttgctggattagttgccggtgacattcacaaaatagaagcagccgacttagatggtgtgattcaacgcggcggaactttactatactccgcacgttatccagaatttgcccatgaagaaggtcaattaaaagggatcgaacaattgaagcggtttgggattgatgctttagttgttatcggtggcgacggttcttaccatggcgcattgcgcttaacggaacacggctacaacacgattggtcttccagggacgatcgataatgatattccttacacggacttcacaattggttttgacactgctgtcaacaccaacgtgcaagctcttgaccggatttatgatacggctcatagtcatgaccggactttcgttgtggaagttatgggtcgtggcgctggtgacgtagccttatggtccggtgtttcaatcggcgcgactgctatcgtggtccccgaagttgattgggacatggaagaaatcgccaacaagattaagcataaccgggccaatggtcatcggagcaacttgattgtgttagccgaaggtgtgatgggtgcccaggagtttgttgagaagttatccgaatatggtgactttgatgctcgtgggaataccattgctcatatgcaacgtggtgggaatccaactgctaaagaccgtgtcatggccagcaagatgggtgcctacgctgtggaactcttgcttgccggcaagggtggcttagcggttgggattcaaaacaaccaattagtcaaccacaacatcttagatttatttgaatctaagcatgacgttgaagtgtcattagataagttgaatgaagaaatttcattcaagtaa

SEQ ID NO: 176 - protein, 320 aa, Lactobacillus plantarum
MKRIGILTSGGDAPGMNAAVRAVAGKAMAEGLEAYGINYGFAGLVAGDIHKIEAADLDGVIQRGGTLLYSARYPEFAHEEGQLKGIEQLKRFGIDALVVIGGDGSYHGALRLTEHGYNTIGLPGTIDNDIPYTDFTIGFDTAVNTNVQALDRIYDTAHSHDRTFVVEVMGRGAGDVALWSGVSIGATAIVVPEVDWDMEEIANKIKHNRANGHRSNLIVLAEGVMGAQEFVEKLSEYGDFDARGNTIAHMQRGGNPTAKDRVMASKMGAYAVELLLAGKGGLAVGIQNNQLVNHNILDLFESKHDVEVSLDKLNEEISFK

SEQ ID NO: 177 - DNA, 1053 bp, Escherichia coli
atgacagatattgcgcagttgcttggcaaagacgccgacaaccttttacagcaccgttgtatgacaattccttctgaccagctttatctccccggacatgactacgtagaccgcgtaatgattgacaataatcgcccgccagcggtgttacgtaatatgcagacgttgtacaacaccgggcgtctggctggcacaggatatctttctattctgccggttgaccagggcgttgagcactctgccggagcttcatttgctgctaacccgctctactttgacccgaaaaacattgttgaactggcgatcgaagcgggctgtaactgtgtggcgtcaacttacggcgtgctggcgtcggtatcgcggcgttatgcgcatcgcattccattcctcgtcaaacttaatcacaacgagacgctaagttacccgaatacctacgatcaaacgctgtatgccagcgtggagcaggcgttcaacatgggcgcggttgcggttggtgcgactatctattttggctcggaagagtcacgtcgccagattgaagaaatttctgcggcttttgaacgtgcgcacgagctgggtatggtgacagtgctgtgggcctatttgcgtaactccgcctttaagaaagatggcgttgattaccatgtttccgccgacctgaccggtcaggcaaaccatctggcggcaaccatcggtgcagatatcgtcaaacaaaaaatggcggaaaataacggcggctataaagcaattaattacggttacaccgacgatcgtgtttacagcaaattgaccagcgaaaacccgattgatctggtgcgttatcagttagctaactgctatatgggtcgggctgggttgataaactccggcggtgctgcgggcggtgaaactgacctcagcgatgcagtgcgtactgcggttatcaacaaacgcgcaggcggaatggggctgattcttggacgtaaagcgttcaagaaatcgatggctgacggcgtgaaactgattaacgccgtgcaggacgtttatctcgatagcaaaattactatcgcctga

SEQ ID NO: 178 - protein, 350 aa, Escherichia coli [sequence omitted]

SEQ ID NO: 179 - DNA, 1080 bp, Escherichia coli
atgtctaagatttttgatttcgtaaaacctggcgtaatcactggtgatgacgtacagaaagttttccaggtagcaaaagaaaacaacttcgcactgccagcagtaaactgcgtcggtactgactccatcaacgccgtactggaaaccgctgctaaagttaaagcgccggttatcgttcagttctccaacggtggtgcttcctttatcgctggtaaaggcgtgaaatctgacgttccgcagggtgctgctatcctgggcgcgatctctggtgcgcatcacgttcaccagatggctgaacattatggtgttccggttatcctgcacactgaccactgcgcgaagaaactgctgccgtggatcgacggtctgttggacgcgggtgaaaaacacttcgcagctaccggtaagccgctgttctcttctcacatgatcgacctgtctgaagaatctctgcaagagaacatcgaaatctgctctaaatacctggagcgcatgtccaaaatcggcatgactctggaaatcgaactgggttgcaccggtggtgaagaagacggcgtggacaacagccacatggacgcttctgcactgtacacccagccggaagacgttgattacgcatacaccgaactgagcaaaatcagcccgcgtttcaccatcgcagcgtccttcggtaacgtacacggtgtttacaagccgggtaacgtggttctgactccgaccatcctgcgtgattctcaggaatatgtttccaagaaacacaacctgccgcacaacagcctgaacttcgtattccacggtggttccggttctactgctcaggaaatcaaagactccgtaagctacggcgtagtaaaaatgaacatcgataccgatacccaatgggcaacctgggaaggcgttctgaactactacaaagcgaacgaagcttatctgcagggtcagctgggtaacccgaaaggcgaagatcagccgaacaagaaatactacgatccgcgcgtatggctgcgtgccggtcagacttcgatgatcgctcgtctggagaaagcattccaggaactgaacgcgatcgacgttctgtaa

SEQ ID NO: 180 - protein, 359 aa, Escherichia coli
MSKIFDFVKPGVITGDDVQKVFQVAKENNFALPAVNCVGTDSINAVLETAAKVKAPVIVQFSNGGASFIAGKGVKSDVPQGAAILGAISGAHHVHQMAEHYGVPVILHTDHCAKKLLPWIDGLLDAGEKHFAATGKPLFSSHMIDLSEESLQENIEICSKYLERMSKIGMTLEIELGCTGGEEDGVDNSHMDASALYTQPEDVDYAYTELSKISPRFTIAASFGNVHGVYKPGNVVLTPTILRDSQEYVSKKHNLPHNSLNFVFHGGSGSTAQEIKDSVSYGVVKMNIDTDTQWATWEGVLNYYKANEAYLQGQLGNPKGEDQPNKKYYDPRVWLRAGQTSMIARLEKAFQELNAIDVL

SEQ ID NO: 181 - DNA, 31 bp, artificial sequence
  primer
atcctgtacacacaccacatcaccgtgattg

SEQ ID NO: 182 - DNA, 32 bp, artificial sequence
  primer
tcatggtaccaccatgatccacacgatccgtg

SEQ ID NO: 183 - DNA, 32 bp, artificial sequence
  primer
attcagatcttcaattggtcgtatggatcttg

SEQ ID NO: 184 - DNA, 33 bp, artificial sequence
  primer
gcgaggtaccttacagacggttgggggtggaag

SEQ ID NO: 185 - DNA, 1080 bp, Saccharomyces cerevisiae
atgggtgttgaacaaatcttaaagagaaagaccggtgtcatcgttggtgaagatgtccacaacttattcacttacgctaaggaacacaagttcgctattccagctattaacgtcacctcttcttctactgccgtcgctgctttagaagctgctagagacagcaagtccccaatcattttgcaaacctctaacggtggtgctgcttacttcgctggtaagggtatctctaacgaaggtcaaaatgcttccatcaagggtgctattgccgctgcccactacatcagatccattgctccagcttacggtatcccagttgtcttacactctgaccactgtgccaagaagttgttgccatggttcgatggtatgttggaagctgatgaagcttacttcaaggaacacggtgaaccattattctcctcccacatgttggatttgtctgaagaaaccgatgaagaaaacatctctacttgtgtcaagtacttcaagagaatggccgctatggaccaatggttagaaatggaaatcggtattaccggtggtgaagaagatggtgttaacaacgaaaacgctgacaaggaagacttgtacaccaagccagaacaagtttacaacgtctacaaggctttgcacccaatctctccaaacttctccattgctgctgctttcggtaactgtcacggtttgtacgctggtgacatcgctttgagaccagaaatcttggctgaacaccaaaagtacaccagagaacaagttggttgcaaggaagaaaagccattgttcttggtcttccacggtggttccggttctactgtccaagaattccacactggtattgacaacggtgttgtcaaggtcaacttggacactgactgtcaatacgcttacttgactggtatcagagactacgtcttgaacaagaaggactacataatgtccccagtcggtaacccagaaggtccagaaaagccaaacaagaagttcttcgacccaagagtctgggttagagaaggtgaaaagaccatgggtgctaagatcaccaagtctttggaaactttccgtaccactaacactttataa

SEQ ID NO: 186 - protein, 359 aa, Saccharomyces cerevisiae
MGVEQILKRKTGVIVGEDVHNLFTYAKEHKFAIPAINVTSSSTAVAALEAARDSKSPIILQTSNGGAAYFAGKGISNEGQNASIKGAIAAAHYIRSIAPAYGIPVVLHSDHCAKKLLPWFDGMLEADEAYFKEHGEPLFSSHMLDLSEETDEENISTCVKYFKRMAAMDQWLEMEIGITGGEEDGVNNENADKEDLYTKPEQVYNVYKALHPISPNFSIAAAFGNCHGLYAGDIALRPEILAEHQKYTREQVGCKEEKPLFLVFHGGSGSTVQEFHTGIDNGVVKVNLDTDCQYAYLTGIRDYVLNKKDYIMSPVGNPEGPEKPNKKFFDPRVWVREGEKTMGAKITKSLETFRTTNTL

SEQ ID NO: 187 - DNA, 864 bp, Lactobacillus plantarum
atgtcatttgtaaatgctgttgatatgacacaagacgcatacaagaaccattatgctattggtgcgttcaacacaaacaaccttgaatggactcgttgcatcttgaagggtgctcaagacactaacaccccagttattatccaagtttcaatgggtgctgctaagtacatgggcggctacaagctcgttatggacttagttgctgatgaaatggaaagcatgaacatcactgttcctgttgttatgcacttagaccacggtaactacgaagctgccaaggaatgtatcgaagttggttactcatcagttatgtttgatggccatgacctaccatttgccgaaaacttagaaaagactaaggaaatcgtcaaattagctcatgctaagggcatctctgttgaagccgaagttggttcaattggtggtgaagaagacggtatcatcggtgaaggtgaattagctgatgttgaagaagctaagactttagctgctactggtatcgacatcttagccgctgggattggtaacatccacggcaagtacccagaaaactggactggcttacacttcgatcgtcttcaagaaatctcagaagccgttaagatgccattggtacttcacggtggttctggtattcctaaggaccaaatcgttaaggctgttgaattgggtattagcaaggttaacgttaacaccgaaaaccaagttgcttttgccaatgcaactcgtgcttacatcgaatctggcgcagaccaaatcggtaagggctacgaccctcgtaagttattggcacctggtaagaaggccatcgttgatgttgttacatcacggattggctggttcaagactccagctgttaaataa

SEQ ID NO: 188 - protein, 287 aa, Lactobacillus plantarum
MSFVNAVDMTQDAYKNHYAIGAFNTNNLEWTRCILKGAQDTNTPVIIQVSMGAAKYMGGYKLVMDLVADEMESMNITVPVVMHLDHGNYEAAKECIEVGYSSVMFDGHDLPFAENLEKTKEIVKLAHAKGISVEAEVGSIGGEEDGIIGEGELADVEEAKTLAATGIDILAAGIGNIHGKYPENWTGLHFDRLQEISEAVKMPLVLHGGSGIPKDQIVKAVELGISKVNVNTENQVAFANATRAYIESGADQIGKGYDPRKLLAPGKKAIVDVVTSRIGWFKTPAVK

SEQ ID NO: 189 - DNA, 1647 bp, Lactococcus lactis
atgtatacagtaggagattacctattagaccgattacacgagttaggaattgaagaaatttttggagtccctggagactataacttacaatttttagatcaaattatttcccacaaggatatgaaatgggtcggaaatgctaatgaattaaatgcttcatatatggctgatggctatgctcgtactaaaaaagctgccgcatttcttacaacctttggagtaggtgaattgagtgcagttaatggattagcaggaagttacgccgaaaatttaccagtagtagaaatagtgggatcacctacatcaaaagttcaaaatgaaggaaaatttgttcatcatacgctggctgacggtgattttaaacactttatgaaaatgcacgaacctgttacagcagctcgaactttactgacagcagaaaatgcaaccgttgaaattgaccgagtactttctgcactattaaaagaaagaaaacctgtctatatcaacttaccagttgatgttgctgctgcaaaagcagagaaaccctcactccctttgaaaaaggaaaactcaacttcaaatacaagtgaccaagaaattttgaacaaaattcaagaaagcttgaaaaatgccaaaaaaccaatcgtgattacaggacatgaaataattagttttggcttagaaaaaacagtcactcaatttatttcaaagacaaaactacctattacgacattaaactttggtaaaagttcagttgatgaagccctcccttcatttttaggaatctataatggtacactctcagagcctaatcttaaagaattcgtggaatcagccgacttcatcttgatgcttggagttaaactcacagactcttcaacaggagccttcactcatcatttaaatgaaaataaaatgatttcactgaatatagatgaaggaaaaatatttaacgaaagaatccaaaattttgattttgaatccctcatctcctctctcttagacctaagcgaaatagaatacaaaggaaaatatatcgataaaaagcaagaagactttgttccatcaaatgcgcttttatcacaagaccgcctatggcaagcagttgaaaacctaactcaaagcaatgaaacaatcgttgctgaacaagggacatcattctttggcgcttcatcaattttcttaaaatcaaagagtcattttattggtcaacccttatggggatcaattggatatacattcccagcagcattaggaagccaaattgcagataaagaaagcagacaccttttatttattggtgatggttcacttcaacttacagtgcaagaattaggattagcaatcagagaaaaaattaatccaatttgctttattatcaataatgatggttatacagtcgaaagagaaattcatggaccaaatcaaagctacaatgatattccaatgtggaattactcaaaattaccagaatcgtttggagcaacagaagatcgagtagtctcaaaaatcgttagaactgaaaatgaatttgtgtctgtcatgaaagaagctcaagcagatccaaatagaatgtactggattgagttaattttggcaaaagaaggtgcaccaaaagtactgaaaaaaatgggcaaactatttgctgaacaaaataaatcataa

SEQ ID NO: 190 - DNA, 750 bp, Saccharomyces cerevisiae
atggtgacagtcggtgtgttttctgagagggctagtttgacccatcaattgggggaattcatcgtcaagaaacaagatgaggcgctgcaaaagaagtcagactttaaagtttccgttagcggtggctctttgatcgatgctctgtatgaaagtttagtagcggacgaatcactatcttctcgagtgcaatggtctaaatggcaaatctacttctctgatgaaagaattgtgccactgacggacgctgacagcaattatggtgccttcaagagagctgttctagataaattaccctcgactagtcagccaaacgtttatcccatggacgagtccttgattggcagcgatgctgaatctaacaacaaaattgctgcagagtacgagcgtatcgtacctcaagtgcttgatttggtactgttgggctgtggtcctgatggacacacttgttccttattccctggagaaacacataggtacttgctgaacgaaacaaccaaaagagttgcttggtgccacgattctcccaagcctccaagtgacagaatcaccttcactctgcctgtgttgaaagacgccaaagccctgtgttttgtggctgagggcagttccaaacaaaatataatgcatgagatctttgacttgaaaaacgatcaattgccaaccgcattggttaacaaattatttggtgaaaaaacatcctggttcgttaatgaggaagcttttggaaaagttcaaacgaaaactttttag

SEQ ID NO: 191 - protein, 249 aa, Saccharomyces cerevisiae
MVTVGVFSERASLTHQLGEFIVKKQDEALQKKSDFKVSVSGGSLIDALYESLVADESLSSRVQWSKWQIYFSDERIVPLTDADSNYGAFKRAVLDKLPSTSQPNVYPMDESLIGSDAESNNKIAAEYERIVPQVLDLVLLGCGPDGHTCSLFPGETHRYLLNETTKRVAWCHDSPKPPSDRITFTLPVLKDAKALCFVAEGSSKQNIMHEIFDLKNDQLPTALVNKLFGEKTSWFVNEEAFGKVQTKTF

SEQ ID NO: 192 - DNA, 54 bp, artificial sequence
  primer
aagcggatccatatataggaggaatttttgtaatggtcaaggtttattataatg

SEQ ID NO: 193 - DNA, 32 bp, artificial sequence
  primer
ttaagagctcttaattttgggcaactgagacg

SEQ ID NO: 194 - DNA, 1206 bp, Azotobacter vinelandii
atgcctggcggaacagccgctggagtgggagcggctgacggtcgtcccggccgacgagcgctgggtgccgcctggacatcccgacagcaatgccggcctggtgcggcgccatctgctgcgcggccgggcggtccaggcgcgtttcgtcggcctctatcagccggccgactcccacgaggcggcggcgcggcttgccgatgcggcgctggccgggctgtccctgccgatcgacgtgctggtactgggcatgggcgaggacggtcacaccgcctcgctgtttcccggcagtccgaacctcgacgcggccctcgatcccgcctgtccgcgccgttgcctgccgatgctggcccccggcgagccccgccggcgcctgacgctgaccctgcccctgctggcctcggcgcgttcgacgctgctgcaactgcagggcgacgccaagctcgccaccctgcgggccacactggccggagaagatgcccggcagatgccgatccgcgccttcctgcattcccccctcgagatctactggtgccgctgagcgccgaggagccccgcatgtccgttcccatggccgagaagatcgccgccctcgacagtctctgcgcccaggcgcgaatcctgccggtgatcaccgtgcgtcaggcggcgcacatcctgccgctggccgatgctctggccgccggcggcctgcgcaccctggaggtcaccctgcgctcgtcgcacggcctgaccgccatccgcaccctgcggcgggagcggccgcagttgtgcgtcggtgtcggtaccgtactcgatcggacgatgctggccgaggccgaagccgccggcgcgcagttcgtggtcagccccggctgtaccgcggaattgctccaggccgccctggaaagcccgttgccgttgctgccgggggccggcagcgcttccgacctgatgctcggccacggcctgggctaccggcgcttcaagctgttcccggcggaggtctgcggtggcgtggcggcgctgcaggctttcgcggggccctttcccggcatccgtttctgccccaccggcggcgtccgtccgggcaacctgcgggagtacatggcgcagcccaatgtgatgtgcgtgggcggttcctggatgctcgacgccgaggccatggatcgcggcgactgggcgtccgtcgagcgtctgacccgcgaggccgtggccctgctcgactga

SEQ ID NO: 195 - protein, 401 aa, Azotobacter vinelandii
MPGGTAAGVGAADGRPGRRALGAAWTSRQQCRPGAAPSAARPGGPGAFRRPLSAGRLPRGGGAACRCGAGRAVPADRRAGTGHGRGRSHRLAVSRQSEPRRGPRSRLSAPLPADAGPRRAPPAPDADPAPAGLGAFDAAATAGRRQARHPAGHTGRRRCPADADPRLPAFPPRDLLVPLSAEEPRMSVPMAEKIAALDSLCAQARILPVITVRQAAHILPLADALAAGGLRTLEVTLRSSHGLTAIRTLRRERPQLCVGVGTVLDRTMLAEAEAAGAQFVVSPGCTAELLQAALESPLPLLPGAGSASDLMLGHGLGYRRFKLFPAEVCGGVAALQAFAGPFPGIRFCPTGGVRPGNLREYMAQPNVMCVGGSWMLDAEAMDRGDWASVERLTREAVALLD

SEQ ID NO: 196 - DNA, 690 bp, Azotobacter vinelandii
atgaacagcatccagaacaacaaaccggccacttcccagagcgtgccgagcatggccgacaaggtcgccctgatcgatcggctgtgcgcggaagcccgcatccttccggtcatcaccatcgagcgcgaagcggacatcctgccgatggccgatgctctggccgccggcggcctgcgtaccctggaggtcaccctgcgctccgagcacggcctgaccgccatccgcgtgctgcgcgaggcgcgcccggagctctgcgtcggcgccggcaccgtgctcgacgaaagcatgctggccgacgccgtggcggcgggcgcgcagttcatcgtcactcccggcagtacccccgaactgctgaaggccgggatgaactgcccggtgccgctgctgccgggcatcggcagcgcctcggaactcatgctcggctacgccctgggctaccgccgcttcaagctgtttccggccgagatcgccggcggcatcccggcgttgaaggcgctcggcgggccgttcggcaacgtccgtttctgccccaccggcggtgtcaacccgagcaacgtcaagaactacatggcccagcccaatgtgatgtgcgtgggcggtacctggatgctggacagcgcctggacgcgcgccggcgactggcaacgcgttcagcaggccagtgccgaggcactgcaactgctgggctga

SEQ ID NO: 197 - protein, 229 aa, Azotobacter vinelandii
MNSIQNNKPATSQSVPSMADKVALIDRLCAEARILPVITIEREADILPMADALAAGGLRTLEVTLRSEHGLTAIRVLREARPELCVGAGTVLDESMLADAVAAGAQFIVTPGSTPELLKAGMNCPVPLLPGIGSASELMLGYALGYRRFKLFPAEIAGGIPALKALGGPFGNVRFCPTGGVNPSNVKNYMAQPNVMCVGGTWMLDSAWTRAGDWQRVQQASAEALQLLG

SEQ ID NO: 198 - DNA, 651 bp, Azotobacter vinelandii
atggtcatgacgatggatgcggtgctgcagcgtgcgcgtccggtgctcccggtattggtgatcgaagacgccgaactggcggtggatctggcgcgggcgctgcacgcaggcggcatccaggtactcgaggtgacgttgcgcacctcgcgcgcactggatgcgctggcggcgatccggcaggcgctgccggacctgctggtcggtgccggcaccctgatccatagcgagcagttcctcgaggcccgcgatgccggtgcgcaattcgtcgtcagtcccggctgtacccagcgcctggcggcggccgccgacgattgccggctgccctacctgccgggcgtgatgacgccctcggaagtcctgcaggccctggagttcggctatcgctcgctgaagctgttcccggccaacggcaccaccagcgtgaagatgctgaagagtttcaaggagccgttcagcggcatccgcttctgtcccaccggcggggtgacgccggacaatctgctgagcttcctcggtctgcccaacgtcgcctgcgtgggggggacctgggtcgcgcccgccagcctgatccgcgcccgcgcctgggaccagatcacccaactcgcccgcgaggcctgcgaacaggcggccagtttggagcaccattcttga

SEQ ID NO: 199 - protein, 216 aa, Azotobacter vinelandii
MVMTMDAVLQRARPVLPVLVIEDAELAVDLARALHAGGIQVLEVTLRTSRALDALAAIRQALPDLLVGAGTLIHSEQFLEARDAGAQFVVSPGCTQRLAAAADDCRLPYLPGVMTPSEVLQALEFGYRSLKLFPANGTTSVKMLKSFKEPFSGIRFCPTGGVTPDNLLSFLGLPNVACVGGTWVAPASLIRARAWDQITQLAREACEQAASLEHHS

SEQ ID NO: 200 - DNA, 624 bp, Azotobacter vinelandii
atgtttgacgactgcatgcgccagctgccgctggtagccattctgcgcggcatcaccgccgaggagatcctgccggtcggccgggtcctgtacgacgcgggctttcgcctgatcgaggtccccctgaactcgccgcggccgctggaaagcatccgccttctggccgccgagctgggtcagcgctgtctggtcggcgccggcaccgtgctcgaagccgggcagatcgaggcggtcgccgccgccggcggccggctgatcgtgatgccgcacagcgacgcgcggctgatccgcgcggccaaggccgccgggctgttctgcgcccccggcgtggccaccccgaccgagggcttcgccgcgctggaggccggcgccgacgcgctcaagctgttccccgccgagcaattcggtccggcggtggtcaaggcctggcgtgcggtgttcgcccgcgatatcgccctgctgccggtcggcggcatcgccccggacagcctgcagccctacctcgacgccggcgccagcggtttcggcctgggctcggcgctgtaccagccgggcctgagcgccgccgaggtcgggcagcgggccgcggccttcgtcgccgcctggcaacggacgcagggctga

SEQ ID NO: 201 - protein, 207 aa, Azotobacter vinelandii
MFDDCMRQLPLVAILRGITAEEILPVGRVLYDAGFRLIEVPLNSPRPLESIRLLAAELGQRCLVGAGTVLEAGQIEAVAAAGGRLIVMPHSDARLIRAAKAAGLFCAPGVATPTEGFAALEAGADALKLFPAEQFGPAVVKAWRAVFARDIALLPVGGIAPDSLQPYLDAGASGFGLGSALYQPGLSAAEVGQRAAAFVAAWQRTQG

SEQ ID NO: 202 - DNA, 708 bp, Pseudomonas putida
gtgcccatgagccaaggatccacagtcatgaccacccttgaacgcccacagcccaagctctcgatggctgataaagccgcgcggatcgacgccatttgcaaaaaggcgcgcatcctgccggtaatcaccattgctcgtgaggaagacatcctgccgctggctgacgccctggccgctggcggtatccgtaccctggaagtgaccctgcgctcacagcatggcctcaaggccattcaggtgctgcgtgagcagcgcccggagctgtgtgtcggcgccggtaccgtgctcgaccgcagcatgttcgcggcggttgaagctgcgggcgcgcagttcgtcgttacccctggtattacccaggacattctcgaggctggcgtggacagtgaaattccgctgttgccgggcatcagcacgccgtccgaaatcatgatgggctatgccctgggctaccgccggttcaagttgttcccggcggaaatcagcggcggcgtagcagcgatcaaggcctttggtggcccgttcggcgatattcgtttttgtcctaccggtggtgtaaacccggccaacgtgcgcaactacatggcactgccaaacgtgatgtgcgtggggggaacctggatgctcgacagcagctggatcaagaacggtgactgggcgcggatcgaagcgtgcagtgccgaggcgatggcactgctggacgccaactga

SEQ ID NO: 203 - protein, 235 aa, Pseudomonas putida
MPMSQGSTVMTTLERPQPKLSMADKAARIDAICKKARILPVITIAREEDILPLADALAAGGIRTLEVTLRSQHGLKAIQVLREQRPELCVGAGTVLDRSMFAAVEAAGAQFVVTPGITQDILEAGVDSEIPLLPGISTPSEIMMGYALGYRRFKLFPAEISGGVAAIKAFGGPFGDIRFCPTGGVNPANVRNYMALPNVMCVGGTWMLDSSWIKNGDWARIEACSAEAMALLDAN

SEQ ID NO: 204 - DNA, 666 bp, Pseudomonas fluorescens
atgacaaacctcgccccgaccgtttccatggcggacaaagttgccctgatcgacagcctctgcgccaaggcgcggatcctgccggtgatcaccattgcccgcgagcaggatgtcctgccgctggccgatgccctggcggccggcggcctgaccgccctggaagtgaccctgcgttcgcagttcggcctcaaggcgatccagatcctgcgcgaacagcgcccggagctggtgaccggtgccggcaccgtgctcgacccgcagatgctggtggcggcggaagcggcaggttcgcagttcatcgtcaccccgggcatcacccgcgacctgctgcaagccagcgtggccagcccgattcccctgctgccggggatcagcaatgcctccgggatcatggagggttatgccctgggctaccgccgcttcaagctgttcccggcggaagtcagtggtggcgtggcggcgatcaaggccctgggcgggccgttcggcgaggtcaagttctgccctaccggcggcgtcggcccggccaatatcaagagctacatggcgctcaagaatgtgatgtgtgtcggcggtagctggatgctcgatcccgagtggatcaagaacggcgactgggcacggatccaggagtgcacggccgaggccctggccctgctggactga

SEQ ID NO: 205 - protein, 221 aa, Pseudomonas fluorescens
MTNLAPTVSMADKVALIDSLCAKARILPVITIAREQDVLPLADALAAGGLTALEVTLRSQFGLKAIQILREQRPELVTGAGTVLDPQMLVAAEAAGSQFIVTPGITRDLLQASVASPIPLLPGISNASGIMEGYALGYRRFKLFPAEVSGGVAAIKALGGPFGEVKFCPTGGVGPANIKSYMALKNVMCVGGSWMLDPEWIKNGDWARIQECTAEALALLD

SEQ ID NO: 206 - DNA, 627 bp, Zymomonas mobilis
atgcgtgatatcgattccgtaatgcgtttggcaccggttatgccggtcctcgtcattgaagatattgctgatgcaaaacctatcgcagaagctttggttgctggtggtctgaacgttcttgaagtaacgcttcgcaccccttgtgctcttgaagccatcaagatcatgaaagaagttccgggtgccgttgttggtgccggtacggttctgaacgcaaaaatgctcgaccaagctcaggaagctggttgcgaatttttcgttagcccgggtctgaccgctgacctcggcaagcatgctgttgcccagaaagcagctttgcttccaggtgttgctaatgctgctgatgtgatgcttggtcttgaccttggtcttgatcgcttcaaattcttcccggctgaaaatatcggtggtttacctgccctgaagtccatggcttctgttttccgtcaggttcgtttctgcccgaccggcggtatcaccccgacgtcagctcctaaatatcttgaaaacccgtccattctttgcgtcggtggtagctgggttgttccggctggcaaaccagatgtcgcaaaaatcacggcactcgctaaagaagcttctgctttcaagcgcgctgctgttgcctaa

SEQ ID NO: 207 - protein, 208 aa, Zymomonas mobilis
MRDIDSVMRLAPVMPVLVIEDIADAKPIAEALVAGGLNVLEVTLRTPCALEAIKIMKEVPGAVVGAGTVLNAKMLDQAQEAGCEFFVSPGLTADLGKHAVAQKAALLPGVANAADVMLGLDLGLDRFKFFPAENIGGLPALKSMASVFRQVRFCPTGGITPTSAPKYLENPSILCVGGSWVVPAGKPDVAKITALAKEASAFKRAAVA

SEQ ID NO: 208 - DNA, 642 bp, Escherichia coli
atgaaaaactggaaaacaagtgcagaatcaatcctgaccaccggcccggttgtaccggttatcgtggtaaaaaaactggaacacgcggtgccgatggcaaaagcgttggttgctggtggggtgcgcgttctggaagtgactctgcgtaccgagtgtgcagttgacgctatccgtgctatcgccaaagaagtgcctgaagcgattgtgggtgccggtacggtgctgaatccacagcagctggcagaagtcactgaagcgggtgcacagttcgcaattagcccgggtctgaccgagccgctgctgaaagctgctaccgaagggactattcctctgattccggggatcagcactgtttccgaactgatgctgggtatggactacggtttgaaagagttcaaattcttcccggctgaagctaacggcggcgtgaaagccctgcaggcgatcgcgggtccgttctcccaggtccgtttctgcccgacgggtggtatttctccggctaactaccgtgactacctggcgctgaaaagcgtgctgtgcatcggtggttcctggctggttccggcagatgcgctggaagcgggcgattacgaccgcattactaagctggcgcgtgaagctgtagaaggcgctaagctgtaa

SEQ ID NO: 209 - protein, 213 aa, Escherichia coli
MKNWKTSAESILTTGPVVPVIVVKKLEHAVPMAKALVAGGVRVLEVTLRTECAVDAIRAIAKEVPEAIVGAGTVLNPQQLAEVTEAGAQFAISPGLTEPLLKAATEGTIPLIPGISTVSELMLGMDYGLKEFKFFPAEANGGVKALQAIAGPFSQVRFCPTGGISPANYRDYLALKSVLCIGGSWLVPADALEAGDYDRITKLAREAVEGAKL

SEQ ID NO: 210 - DNA, 54 bp, artificial sequence
  primer
ttgattaattaaatataggaggaatttttgtaatgaaagctctggtttatcacg

SEQ ID NO: 211 - DNA, 34 bp, artificial sequence
  primer
cgacgcggccgctcaggcagcgcctgcgttcgag

SEQ ID NO: 212 - DNA, 1485 bp, Vibrio cholerae
atggcgaattatttcaatacgctgaatctgcgtgaacagttggatcaacttggtcgttgccgttttatggcgcgagaagagtttgcaaccgaagctgattacctaaaaggtaagaaagtggtgatcgtaggttgtggggctcaaggcctaaaccaaggcctcaatatgcgtgattcaggtttggatgtttcttacgctctgcgtcaggctgcgattgatgaacagcgtcagtcatttaagaatgccaagaataatggcttcaacgtgggtagttatgaacaactcatcccaaccgcagatttggtgattaacttgacgccagacaagcagcacaccagtgtggtcaatgcggtgatgcctctgatgaagcaaggtgctgccttgggttactcacacggttttaatatcgttgaagagggcatgcagatccgtaaagacatcacggttgtgatggtggcaccaaaatgtccgggtacggaagttcgtgaagagtataagcgcggtttcggcgttcctactcttatcgcggtacaccctgaaaacgatccacaaggtgaaggttgggaaattgctaaagcgtgggctgcggcaacgggtggccatcgtgcgggctgtttagcttcttcttttgtggcggaagtgaaatccgatttgatgggtgagcaaaccattctctgcggtatgctgcaagcgggctctatcgtttgttacgagaaaatggttgctgatggcatcgaccctggttatgcgggcaagcttttgcaatttggttgggaaaccattaccgaagcactcaagtttggcggtattactcatatgatggatcgcctgtctaaccctgcaaaaatcaaagcgtttgagctgtctgaagagttgaaagatctgatgcgcccactgtacaacaagcatatggatgacatcatttctggccacttctctagcaccatgatggcggattgggcgaatgatgataaagacttattcggctggcgtgcagaaaccgctgagacgacctttgaaaactatccaacaaccgacgtaaaaattgctgagcaagaatactttgataacggtattttgatgattgccatggtgcgtgctggggttgagttggcgtttgaagcgatgacggcttcaggcatcatcgatgagtcggcttactatgaatcactgcacgaactcccactgattgccaatacggtagcgcgtaagcgtctgtatgaaatgaacgtggtaatctctgacactgctgagtacggtaactatctgtttgccaatgtggcggtaccactattgcgtgaaaagtttatgccgaaagtgggcactgatgtgattggtaaaggattaggcgtggtctctaatcaagttgataacgcaacgcttatcgaagtaaacagcatcatccgtaaccatccggttgagtatatcggtgaagagctacgcggttacatgaaagacatgaagcgcatcgccgtgggtgattaa

SEQ ID NO: 213 - protein, 494 aa, Vibrio cholerae
MANYFNTLNLREQLDQLGRCRFMAREEFATEADYLKGKKVVIVGCGAQGLNQGLNMRDSGLDVSYALRQAAIDEQRQSFKNAKNNGFNVGSYEQLIPTADLVINLTPDKQHTSVVNAVMPLMKQGAALGYSHGFNIVEEGMQIRKDITVVMVAPKCPGTEVREEYKRGFGVPTLIAVHPENDPQGEGWEIAKAWAAATGGHRAGCLASSFVAEVKSDLMGEQTILCGMLQAGSIVCYEKMVADGIDPGYAGKLLQFGWETITEALKFGGITHMMDRLSNPAKIKAFELSEELKDLMRPLYNKHMDDIISGHFSSTMMADWANDDKDLFGWRAETAETTFENYPTTDVKIAEQEYFDNGILMIAMVRAGVELAFEAMTASGIIDESAYYESLHELPLIANTVARKRLYEMNVVISDTAEYGNYLFANVAVPLLREKFMPKVGTDVIGKGLGVVSNQVDNATLIEVNSIIRNHPVEYIGEELRGYMKDMKRIAVGD

SEQ ID NO: 214 - DNA, 1017 bp, Pseudomonas aeruginosa
atgcgcgttttctacgataaagactgtgacctctcgatcatccagggcaagaaagttgccatcatcggctacggctcccagggccacgcccatgcctgcaacctgaaggactccggcgtcgacgtcaccgtgggcctgcgtagcggctccgccaccgtggccaaggccgaagcgcacggtctgaaggttgccgacgtgaagaccgccgtcgccgcagccgacgtggtcatgatcctcaccccggacgagttccagggccgcctgtacaaggaagagatcgagccgaacctgaagaagggcgccaccctggccttcgctcacggcttctccatccactacaaccaggtcgtcccgcgcgccgacctcgacgtgatcatgatcgcgccgaaggcaccgggtcacaccgtgcgttccgagttcgtcaagggcggtggcatccctgacctgatcgccatctaccaggacgcttccggcaacgccaagaacgtcgccctgtcctacgcctgcggcgtcggcggcggtcgtaccggtatcatcgaaaccaccttcaaggacgagaccgaaaccgacctgttcggtgagcaggccgttctctgcggtggttgcgtcgagctggtcaaggccggtttcgaaaccctggtcgaagccggttacgcgccggaaatggcctacttcgagtgcctgcacgagctgaagctgatcgtcgacctgatgtacgaaggcggcatcgccaacatgaactactccatctccaacaatgccgaatacggtgagtacgtaaccggtccggaggtgatcaacgccgagtcccgtgctgccatgcgcaacgccctgaagcgcatccaggacggcgagtacgcgaaaatgttcattaccgaaggtgcggccaactacccgtcgatgactgcctaccgccgcaacaacgccgctcacccgatcgagcagatcggcgagaagctgcgcgcgatgatgccgtggatcgcagccaacaagatcgtcgacaagagcaagaactaa

SEQ ID NO: 215 - protein, 338 aa, Pseudomonas aeruginosa
MRVFYDKDCDLSIIQGKKVAIIGYGSQGHAHACNLKDSGVDVTVGLRSGSATVAKAEAHGLKVADVKTAVAAADVVMILTPDEFQGRLYKEEIEPNLKKGATLAFAHGFSIHYNQVVPRADLDVIMIAPKAPGHTVRSEFVKGGGIPDLIAIYQDASGNAKNVALSYACGVGGGRTGIIETTFKDETETDLFGEQAVLCGGCVELVKAGFETLVEAGYAPEMAYFECLHELKLIVDLMYEGGIANMNYSISNNAEYGEYVTGPEVINAESRAAMRNALKRIQDGEYAKMFITEGAANYPSMTAYRRNNAAHPIEQIGEKLRAMMPWIAANKIVDKSKN

SEQ ID NO: 216 - DNA, 1017 bp, Pseudomonas fluorescens
atgaaagttttctacgataaagactgcgacctgtcgatcatccaaggtaagaaagttgccatcatcggctacggttcccagggccacgctcaagcatgcaacctgaaggattccggcgtagacgtgactgttggcctgcgtaaaggctcggctaccgttgccaaggctgaagcccacggcttgaaagtgaccgacgttgctgcagccgttgccggtgccgacttggtcatgatcctgaccccggacgagttccagtcccagctgtacaagaacgaaatcgagccgaacatcaagaagggcgccactctggccttctcccacggcttcgcgatccactacaaccaggttgtgcctcgtgccgacctcgacgtgatcatgatcgcgccgaaggctccaggccacaccgtacgttccgagttcgtcaagggcggtggtattcctgacctgatcgcgatctaccaggacgcttccggcaacgccaagaacgttgccctgtcctacgccgcaggcgtgggcggcggccgtaccggcatcatcgaaaccaccttcaaggacgagactgaaaccgacctgttcggtgagcaggctgttctgtgtggcggtaccgtcgagctggtcaaagccggtttcgaaaccctggttgaagctggctacgctccagaaatggcctacttcgagtgcctgcacgaactgaagctgatcgttgacctcatgtacgaaggcggtatcgccaacatgaactactcgatctccaacaacgctgaatacggcgagtacgtgactggtccagaagtcatcaacgccgaatcccgtcaggccatgcgcaatgctctgaagcgcatccaggacggcgaatacgcgaagatgttcatcagcgaaggcgctaccggctacccatcgatgaccgccaagcgtcgtaacaacgctgctcacggtatcgaaatcatcggcgagcaactgcgctcgatgatgccttggatcggtgccaacaaaatcgtcgacaaagccaagaactaa

SEQ ID NO: 217 - protein, 338 aa, Pseudomonas fluorescens
MKVFYDKDCDLSIIQGKKVAIIGYGSQGHAQACNLKDSGVDVTVGLRKGSATVAKAEAHGLKVTDVAAAVAGADLVMILTPDEFQSQLYKNEIEPNIKKGATLAFSHGFAIHYNQVVPRADLDVIMIAPKAPGHTVRSEFVKGGGIPDLIAIYQDASGNAKNVALSYAAGVGGGRTGIIETTFKDETETDLFGEQAVLCGGTVELVKAGFETLVEAGYAPEMAYFECLHELKLIVDLMYEGGIANMNYSISNNAEYGEYVTGPEVINAESRQAMRNALKRIQDGEYAKMFISEGATGYPSMTAKRRNNAAHGIEIIGEQLRSMMPWIGANKIVDKAKN

SEQ ID NO: 218 - DNA, 448 bp, Saccharomyces cerevisiae
cccattaccgacatttgggcgctatacgtgcatatgttcatgtatgtatctgtatttaaaacacttttgtattatttttcctcatatatgtgtataggtttatacggatgatttaattattacttcaccaccctttatttcaggctgatatcttagccttgttactagttagaaaaagacatttttgctgtcagtcactgtcaagagattcttttgctggcatttcttctagaagcaaaaagagcgatgcgtcttttccgctgaaccgttccagcaaaaaagactaccaacgcaatatggattgtcagaatcatataaaagagaagcaaataactccttgtcttgtatcaattgcattataatatcttcttgttagtgcaatatcatatagaagtcatcgaaatagatattaagaaaaacaaactgtacaatcaatcaatcaatcatc

SEQ ID NO: 219 - DNA, 270 bp, Saccharomyces cerevisiae
gacctcgagtcatgtaattagttatgtcacgcttacattcacgccctccccccacatccgctctaaccgaaaaggaaggagttagacaacctgaagtctaggtccctatttatttttttatagttatgttagtattaagaacgttatttatatttcaaatttttcttttttttctgtacagacgcgtgtacgcatgtaacattatactgaaaaccttgcttgagaaggttttgggacgctcgaaggctttaatttgcggccggtacccaa

SEQ ID NO: 220 - DNA, 643 bp, Saccharomyces cerevisiae
gaaatgaataacaatactgacagtactaaataattgcctacttggcttcacatacgttgcatacgtcgatatagataataatgataatgacagcaggattatcgtaatacgtaatagttgaaaatctcaaaaatgtgtgggtcattacgtaaataatgataggaatgggattcttctatttttcctttttccattctagcagccgtcgggaaaacgtggcatcctctctttcgggctcaattggagtcacgctgccgtgagcatcctctctttccatatctaacaactgagcacgtaaccaatggaaaagcatgagcttagcgttgctccaaaaaagtattggatggttaataccatttgtctgttctcttctgactttgactcctcaaaaaaaaaaaatctacaatcaacagatcgcttcaattacgccctcacaaaaacttttttccttcttcttcgcccacgttaaattttatccctcatgttgtctaacggatttctgcacttgatttattataaaaagacaaagacataatacttctctatcaatttcagttattgttcttccttgcgttattcttctgttcttctttttcttttgtcatatataaccataaccaagtaatacatattcaaatctaga

SEQ ID NO: 221 - skipped

SEQ ID NO: 222 - DNA, 316 bp, Saccharomyces cerevisiae
gagtaagcgaatttcttatgatttatgatttttattattaaataagttataaaaaaaataagtgtatacaaattttaaagtgactcttaggttttaaaacgaaaattcttattcttgagtaactctttcctgtaggtcaggttgctttctcaggtatagcatgaggtcgctcttattgaccacacctctaccggcatgccgagcaaatgcctgcaaatcgctccccatttcacccaattgtagatatgctaactccagcaatgagttgatgaatctcggtgtgtattttatgtcctcagaggacaacacctgtggt

SEQ ID NO: 223 - skipped

SEQ ID NO: 224 - DNA, 753 bp, Saccharomyces cerevisiae
gcatgcttgcatttagtcgtgcaatgtatgactttaagatttgtgagcaggaagaaaagggagaatcttctaacgataaacccttgaaaaactgggtagactacgctatgttgagttgctacgcaggctgcacaattacacgagaatgctcccgcctaggatttaaggctaagggacgtgcaatgcagacgacagatctaaatgaccgtgtcggtgaagtgttcgccaaacttttcggttaacacatgcagtgatgcacgcgcgatggtgctaagttacatatatatatatatagccatagtgatgtctaagtaacctttatggtatatttcttaatgtggaaagatactagcgcgcgcacccacacacaagcttcgtcttttcttgaagaaaagaggaagctcgctaaatgggattccactttccgttccctgccagctgatggaaaaaggttagtggaacgatgaagaataaaaagagagatccactgaggtgaaatttcagctgacagcgagtttcatgatcgtgatgaacaatggtaacgagttgtggctgttgccagggagggtggttctcaacttttaatgtatggccaaatcgctacttgggtttgttatataacaaagaagaaataatgaactgattctcttcctccttcttgtcctttcttaattctgttgtaattaccttcctttgtaattttttttgtaattattcttcttaataatccaaacaaacacacatattacaata

SEQ ID NO: 225 - DNA, 70 bp, artificial sequence
  primer
attacgccaagcgcgcaattaaccctcactaaagggaacaaaagcaccacaggtgttgtcctctgaggac

SEQ ID NO: 226 - DNA, 7910 bp, artificial sequence
  vector
tcgcgcgtttcggtgatgacggtgaaaacctctgacacatgcagctcccggagacggtcacagcttgtctgtaagcggatgccgggagcagacaagcccgtcagggcgcgtcagcgggtgttggcgggtgtcggggctggcttaactatgcggcatcagagcagattgtactgagagtgcaccatagccatcctcatgaaaactgtgtaacataataaccgaagtgtcgaaaaggtggcaccttgtccaattgaacacgctcgatgaaaaaaataagatatatataaggttaagtaaagcgtctgttagaaaggaagtttttcctttttcttgctctcttgtcttttcatctactatttccttcgtgtaatacagggtcgtcagatacatagatacaattctattacccccatccatacaatgccatctcatttcgatactgttcaactacacgccggccaagagaaccctggtgacaatgctcacagatccagagctgtaccaatttacgccaccacttcttatgttttcgaaaactctaagcatggttcgcaattgtttggtctagaagttccaggttacgtctattcccgtttccaaaacccaaccagtaatgttttggaagaaagaattgctgctttagaaggtggtgctgctgctttggctgtttcctccggtcaagccgctcaaacccttgccatccaaggtttggcacacactggtgacaacatcgtttccacttcttacttatacggtggtacttataaccagttcaaaatctcgttcaaaagatttggtatcgaggctagatttgttgaaggtgacaatccagaagaattcgaaaaggtctttgatgaaagaaccaaggctgtttatttggaaaccattggtaatccaaagtacaatgttccggattttgaaaaaattgttgcaattgctcacaaacacggtattccagttgtcgttgacaacacatttggtgccggtggttacttctgtcagccaattaaatacggtgctgatattgtaacacattctgctaccaaatggattggtggtcatggtactactatcggtggtattattgttgactctggtaagttcccatggaaggactacccagaaaagttccctcaattctctcaacctgccgaaggatatcacggtactatctacaatgaagcctacggtaacttggcatacatcgttcatgttagaactgaactattaagagatttgggtccattgatgaacccatttgcctctttcttgctactacaaggtgttgaaacattatctttgagagctgaaagacacggtgaaaatgcattgaagttagccaaatggttagaacaatccccatacgtatcttgggtttcataccctggtttagcatctcattctcatcatgaaaatgctaagaagtatctatctaacggtttcggtggtgtcttatctttcggtgtaaaagacttaccaaatgccgacaaggaaactgacccattcaaactttctggtgctcaagttgttgacaatttaaagcttgcctctaacttggccaatgttggtgatgccaagaccttagtcattgctccatacttcactacccacaaacaattaaatgacaaagaaaagttggcatctggtgttaccaaggacttaattcgtgtctctgttggtatcgaatttattgatgacattattgcagacttccagcaatcttttgaaactgttttcgctggccaaaaaccatgagtgtgcgtaatgagttgtaaaattatgtataaacctactttctctcacaagttatgcggtgtgaaataccgcacagatgcgtaaggagaaaataccgcatcaggaaattgtaaacgttaatattttgttaaaattcgcgttaaatttttgttaaatcagctcattttttaaccaataggccgaaatcggcaaaatcccttataaatcaaaagaatagaccgagatagggttgagtgttgttccagtttggaacaagagtccactattaaagaacgtggactccaacgtcaaagggcgaaaaaccgtctatcagggcgatggcccactacgtgaaccatcaccctaatcaagttttttggggtcgaggtgccgtaaagcactaaatcggaaccctaaagggagcccccgatttagagcttgacggggaaagccggcgaacgtggcgagaaaggaagggaagaaagcgaaaggagcgggcgctagggcgctggcaagtgtagcggtcacgctgcgcgtaaccaccacacccgccgcgcttaatgcgccgctacagggcgcgtcgcgccattcgccattcaggctgcgcaactgttgggaagggcgatcggtgcgggcctcttcgctattacgccagctggcgaaagggggatgtgctgcaaggcgattaagttgggtaacgccagggttttcccagtcacgacgttgtaaaacgacggccagtgagcgcgcgtaatacgactcactatagggcgaattgggcatgcttgcatttagtcgtgcaatgtatgactttaagatttgtgagcaggaagaaaagggagaatcttctaacgataaacccttgaaaaactgggtagactacgctatgttgagttgctacgcaggctgcacaattacacgagaatgctcccgcctaggatttaaggctaagggacgtgcaatgcagacgacagatctaaatgaccgtgtcggtgaagtgttcgccaaacttttcggttaacacatgcagtgatgcacgcgcgatggtgctaagttacatatatatatatatatatatatatagccatagtgatgtctaagtaacctttatggtatatttcttaatgtggaaagatactagcgcgcgcacccacacacaagcttcgtcttttcttgaagaaaagaggaagctcgctaaatgggattccactttccgttccctgccagctgatggaaaaaggttagtggaacgatgaagaataaaaagagagatccactgaggtgaaatttcagctgacagcgagtttcatgatcgtgatgaacaatggtaacgagttgtggctgttgccagggagggtggttctcaacttttaatgtatggccaaatcgctacttgggtttgttatataacaaagaagaaataatgaactgattctcttcctccttcttgtcctttcttaattctgttgtaattaccttcctttgtaattttttttgtaattattcttcttaataatccaaacaaacacacatattacaataatggccagcacaatagcacgcactgaggaacgccagaatgctggcaccatggagctcaaagatgacactgtcatcatagtactgggtgcctccggagatcttgcaaagaagaagaccttcccggcccttttcggcctttatcgcaacaagttcctccccaagggaatcaagatcgtcggatatgcccggacaaacatggaccatgaggagtacctgaggcgtgtgcgctcatacatcaagacccctaccaaggaaatcgaagagcagctggacagcttctgccagttctgcacctacatttccggtcaatatgacaaggatgactcgttcatcaacctcaacaagcacctcgaggagattgagaagggccagaaggagcagaacagaatctactacatggccctcccccccagcgttttcaccaccgtttccgaccaacttaagcgcaactgctaccccaagaacggcgttgcccgtatcatcgtagagaagcctttcggcaaggaccttcagagctcgcgcgatctccaaaaagccctggagcctaactggaaggaagaggagatcttccgtatcgaccactacctgggtaaggagatggtcaagaacatccttatcatgcgcttcggaaacgaattcttcaacgccacctggaaccgtcaccacatcgataacgttcagatcacattcaaggagcccttcggcactgagggacgtggtggttacttcgatgaattcggcatcatccgtgatgtcatgcagaaccaccttctccaggtgttgacgctgctcgctatggagcgccccatttccttctccgccgaggacatccgtgacgagaaggttcgtgtcctccgtgcgatggacgccattgagcccaagaacgtcattattggccagtacggaaagtctctggatggcagcaagcccgcctacaaggaggacgagaccgttccccaggattcccgctgccccaccttctgcgctatggtcgcctacatcaagaacgagaggtgggacggtgttcctttcatcatgaaggctggcaaggccttgaacgagcagaagaccgagatccgtatccagttccgtgacgttacctccggaattttcaaggacatccctcgcaacgagctcgttatccgcgtccagcccaacgagtccgtgtacatcaagatgaactccaagctgcctggcctgtccatgcagacggttgtgactgagctcgacctcacctaccgccgccgcttctccgacctcaagatccccgaagcctacgagtctctgatcctggatgctctgaagggcgaccactccaacttcgtccgtgacgatgagctggatgccagctggaggatcttcacccctctcctgcactacctggatgacaacaaggagatcatccccatggaatacccctacggctcccgcggacccgccgtccttgatgacttcaccgcgtccttcggctacaagttcagcgatgctgctggctaccagtggcccttgacttccacccccaaccgtctgtaagagtaagcgaatttcttatgatttatgatttttattattaaataagttataaaaaaaataagtgtatacaaattttaaagtgactcttaggttttaaaacgaaaattcttattcttgagtaactctttcctgtaggtcaggttgctttctcaggtatagcatgaggtcgctcttattgaccacacctctaccggcatgccgagcaaatgcctgcaaatcgctccccatttcacccaattgtagatatgctaactccagcaatgagttgatgaatctcggtgtgtattttatgtcctcagaggacaacacctgtggtgcttttgttccctttagtgagggttaattgcgcgcttggcgtaatcatggtcatagctgtttcctgtgtgaaattgttatccgctcacaattccacacaacatacgagccggaagcataaagtgtaaagcctggggtgcctaatgagtgagctaactcacattaattgcgttgcgctcactgcccgctttccagtcgggaaacctgtcgtgccagctgcattaatgaatcggccaacgcgcggggagaggcggtttgcgtattgggcgctcttccgcttcctcgctcactgactcgctgcgctcggtcgttcggctgcggcgagcggtatcagctcactcaaaggcggtaatacggttatccacagaatcaggggataacgcaggaaagaacatgtgagcaaaaggccagcaaaaggccaggaaccgtaaaaaggccgcgttgctggcgtttttccataggctccgcccccctgacgagcatcacaaaaatcgacgctcaagtcagaggtggcgaaacccgacaggactataaagataccaggcgtttccccctggaagctccctcgtgcgctctcctgttccgaccctgccgcttaccggatacctgtccgcctttctcccttcgggaagcgtggcgctttctcatagctcacgctgtaggtatctcagttcggtgtaggtcgttcgctccaagctgggctgtgtgcacgaaccccccgttcagcccgaccgctgcgccttatccggtaactatcgtcttgagtccaacccggtaagacacgacttatcgccactggcagcagccactggtaacaggattagcagagcgaggtatgtaggcggtgctacagagttcttgaagtggtggcctaactacggctacactagaaggacagtatttggtatctgcgctctgctgaagccagttaccttcggaaaaagagttggtagctcttgatccggcaaacaaaccaccgctggtagcggtggtttttttgtttgcaagcagcagattacgcgcagaaaaaaaggatctcaagaagatcctttgatcttttctacggggtctgacgctcagtggaacgaaaactcacgttaagggattttggtcatgagattatcaaaaaggatcttcacctagatccttttaaattaaaaatgaagttttaaatcaatctaaagtatatatgagtaaacttggtctgacagttaccaatgcttaatcagtgaggcacctatctcagcgatctgtctatttcgttcatccatagttgcctgactccccgtcgtgtagataactacgatacgggagggcttaccatctggccccagtgctgcaatgataccgcgagacccacgctcaccggctccagatttatcagcaataaaccagccagccggaagggccgagcgcagaagtggtcctgcaactttatccgcctccatccagtctattaattgttgccgggaagctagagtaagtagttcgccagttaatagtttgcgcaacgttgttgccattgctacaggcatcgtggtgtcacgctcgtcgtttggtatggcttcattcagctccggttcccaacgatcaaggcgagttacatgatcccccatgttgtgcaaaaaagcggttagctccttcggtcctccgatcgttgtcagaagtaagttggccgcagtgttatcactcatggttatggcagcactgcataattctcttactgtcatgccatccgtaagatgcttttctgtgactggtgagtactcaaccaagtcattctgagaatagtgtatgcggcgaccgagttgctcttgcccggcgtcaatacgggataataccgcgccacatagcagaactttaaaagtgctcatcattggaaaacgttcttcggggcgaaaactctcaaggatcttaccgctgttgagatccagttcgatgtaacccactcgtgcacccaactgatcttcagcatcttttactttcaccagcgtttctgggtgagcaaaaacaggaaggcaaaatgccgcaaaaaagggaataagggcgacacggaaatgttgaatactcatactcttcctttttcaatattattgaagcatttatcagggttattgtctcatgagcggatacatatttgaatgtatttagaaaaataaacaaataggggttccgcgcacatttccccgaaaagtgccacctgggtccttttcatcacgtgctataaaaataattataatttaaattttttaatataaatatataaattaaaaatagaaagtaaaaaaagaaattaaagaaaaaatagtttttgttttccgaagatgtaaaagactctagggggatcgccaacaaatactaccttttatcttgctcttcctgctctcaggtattaatgccgaattgtttcatcttgtctgtgtagaagaccacacacgaaaatcctgtgattttacattttacttatcgttaatcgaatgtatatctatttaatctgcttttcttgtctaataaatatatatgtaaagtacgctttttgttgaaattttttaaacctttgtttatttttttttcttcattccgtaactcttctaccttctttatttactttctaaaatccaaatacaaaacataaaaataaataaacacagagtaaattcccaaattattccatcattaaaagatacgaggcgcgtgtaagttacaggcaagcgatccgtcctaagaaaccattattatcatgacattaacctataaaaataggcgtatcacgaggccctttcgtc

SEQ ID NO: 227 - DNA, 70 bp, artificial sequence
  primer
atgtccaagcaacagatcggcgtagtcggtatggcagtgatgggacgcaagtgtaggctggagctgcttc

SEQ ID NO: 228 - DNA, 70 bp, artificial sequence
  primer
ttaatccagccattcggtatggaacacaccttctttatcaatacgcttatattccggggatccgtcgacc

SEQ ID NO: 229 - DNA, 18 bp, artificial sequence
  primer
atacgccgggcctcaatt

SEQ ID NO: 230 - DNA, 24 bp, artificial sequence
  primer
cacccgtaatataaagccgtaagc

SEQ ID NO: 231 - DNA, 30 bp, artificial sequence
  primer
ggaattcacacatgaaagctctggtttatc

SEQ ID NO: 232 - DNA, 28 bp, artificial sequence
  primer
gcgtccagggcgtcaaagatcaggcagc

SEQ ID NO: 233 - DNA, 30 bp, artificial sequence
  primer
gacctaggaggtcacacatgaaagctctgg

SEQ ID NO: 234 - DNA, 25 bp, artificial sequence
  primer
cgactctagaggatccccgggtacc

SEQ ID NO: 235 - DNA, 22 bp, artificial sequence
  primer
cggtatcatcaacaggcttacc

SEQ ID NO: 236 - DNA, 22 bp, artificial sequence
  primer
agggttttcccagtcacgacgt

SEQ ID NO: 237 - DNA, 91 bp, artificial sequence
  primer
tgttacattacggtgcctcggtgttacgcggtgcttcgtcctggtggtccacgcggccttaaatcctccaatatcaaattaggaatcgtag

SEQ ID NO: 238 - DNA, 85 bp, artificial sequence
  primer
gtttcgggaccccgtttataaacctttaatattttagaaaacacataacttcatatactatcagaggtcgcctgacgcatatacc

SEQ ID NO: 239 - DNA, 30 bp, artificial sequence
  primer
ggcaaaacgacgatcttcttaggggcagac

SEQ ID NO: 240 - DNA, 27 bp, artificial sequence
  primer
tctatcatgataataggcactattgtg

SEQ ID NO: 241 - DNA, 90 bp, artificial sequence
  primer
ctattttcattttaaattttagatcactgctaggagttagctcaaatatatatatatataccataccacagcttttcaattcaattcatc

SEQ ID NO: 242 - DNA, 88 bp, artificial sequence
  primer
ttgcggccctctacacgggcctggcagccagagtaattaagatacgcccaagttgcgccaaacttgattagggtgatggttcacgtag

SEQ ID NO: 243 - DNA, 35 bp, artificial sequence
  primer
gggaagcatatttgagaagatgcggccagcaaaac

SEQ ID NO: 244 - DNA, 29 bp, artificial sequence
  primer
agacgagatggcaaatatccatgatgaac

SEQ ID NO: 245 - DNA, 71 bp, artificial sequence
  primer
attattcttcttaataatccaaacaaacacacatattacaataatggccagcacaatagcacgcactgagg

SEQ ID NO: 246 - DNA, 80 bp, artificial sequence
  primer
aacttatttaataataaaaatcataaatcataagaaattcgcttactcttacagacggttgggggtggaagtcaagggcc

SEQ ID NO: 247 - DNA, 74 bp, artificial sequence
  primer
acgacggccagtgagcgcgcgtaatacgactcactatagggcgaattggcatgcttgcatttagtcgtgcaatg

SEQ ID NO: 248 - DNA, 68 bp, artificial sequence
  primer
cagcattctggcgttcctcagtgcgtgctattgtgctggccattattgtaatatgtgtgtttgtttgg

SEQ ID NO: 249 - DNA, 59 bp, artificial sequence
  primer
ggcccttgacttccacccccaaccgtctgtaagagtaagcgaatttcttatgatttatg

SEQ ID NO: 250 - DNA, 252 bp, Lactobacillus plantarum
taagtcgtattggcaccactactcacaccgtgaccgacgcgcccgccagtcaagtgttcaaaagttagcgtttattaagtgcgataagtataccacaaagggcttattgacgcccgccaaagggttttgcggacattgttaataattgtattaaaagcatgctcaatctaacacttattttgcacaaacatggtatactttaaccgtaaaaactaaattttcactacgagaggatgacttattttgtcaagc

SEQ ID NO: 251 - DNA, 1029 bp, Bacillus subtilis
atggtcaaggtttattataatggtgatattaaggaaaatgtcttagcaggtaaaacggttgcggtcattggttatggtagtcaaggtcatgcccatgccttaaatttaaaggaaagtggtgtcgatgttattgttggtgttcgtcaaggtaagagttttacgcaagcgcaagaagatggtcataaagtcttttcagttaaggaagccgcggctcaagcagaaattattatggtcttattgccagatgaacaacaacaaaaggtttatgaagctgaaattaaggatgaattaacggcaggtaaatcattagtttttgcccacggttttaatgttcattttcatcaaattgttccaccagctgatgttgatgtctttttagttgcaccaaagggtccaggtcacttagttcgtcggacgtatgaacaaggtgcgggtgttccagccttatttgcgatttatcaagatgttacgggtgaagcccgtgataaagctttagcttatgccaaaggtattggtggtgcacgggccggtgttttagaaacgacgtttaaagaagaaacggaaacggatttatttggtgaacaagccgtcttatgtggtggtttgagtgcattagttaaggctggttttgaaacgttgacggaagcaggttatcaaccagaattagcttattttgaatgtttacatgaattgaaattgattgtcgatttaatgtatgaagaaggtttagctggtatgcggtattcaatttcagatacggcacaatggggtgattttgttagtggtccacgggttgttgatgccaaggttaaggaatcaatgaaagaagttttaaaggatattcaaaatggtacgtttgctaaagaatggattgttgaaaatcaagttaatcgtccacgttttaatgctattaatgcgagtgaaaatgaacatcaaattgaagtcgttggtcgtaagttacgggaaatgatgccatttgtcaagcaaggtaagaaaaaggaagctgtcgtctcagttgcccaaaattaa

SEQ ID NO: 252 - DNA, 52 bp, artificial sequence
  primer
ttaagagctcatataggaggaatttttgtaatgtatacagtaggagattacc

SEQ ID NO: 253 - DNA, 34 bp, artificial sequence
  primer
ccgcttaattaatcaactataagagttcatatga

SEQ ID NO: 254 - DNA, 1716 bp, Bacillus subtilis
atgttgaccaaggctaccaaagaacaaaagagtttagtcaaaaaccgtggtgctgaattagtcgtggattgtttggttgaacaaggtgtgacgcatgtttttggtattccaggagctaaaattgatgccgtttttgatgcgttacaagataagggtccagaaattattgtggcacgtcatgaacaaaatgcagcgtttatggctcaagcagttggtcggttgactggcaaaccaggtgtggttttagtgacgtcaggtccaggtgcgagtaatttagcgactggcttgttaacggcgaatactgaaggtgatccagtcgttgctttggcaggcaatgtcattcgtgccgatcgtttaaagcggacccatcagagtttggataatgcagccttgtttcaaccgattacgaaatattcagttgaagtccaagatgtcaagaatattccagaagcggttacgaatgcgtttcgtattgcatcagctggccaagcaggcgcagcgtttgtgagttttccacaagatgtcgtgaatgaagttactaacaccaagaatgtccgtgcagtcgcagctccaaagttaggtccagcagctgacgatgccattagtgcagctattgccaaaattcagactgcaaaattgccggttgtgttagttggcatgaaaggtggtcgtccagaagccattaaagcggttcgtaagttattgaaaaaggttcaattaccatttgttgaaacgtatcaagctgcaggtacgttaagtcgtgacttagaagatcaatattttggtcggattggtttgtttcgtaatcaaccaggtgatttgttattagaacaagctgatgtggttttaactattggctatgatccgattgaatatgatccaaagttttggaatattaatggtgatcgtaccatcattcatttggatgaaatcattgctgatattgatcacgcttatcaaccggatttggaattaattggtgacattccaagtacgattaatcacattgaacatgatgctgtgaaggttgagtttgcggaacgggaacagaaaattttatcagatttgaagcaatatatgcatgaaggtgaacaagtgccagcagattggaagtcagatcgggcccatccattagaaattgttaaagaattacggaatgcagtggacgatcatgtgaccgtgacttgtgatattggtagtcatgctatttggatgagtcgttactttcggtcatatgaaccgttaactttaatgatttcaaacggtatgcaaactttaggtgttgccttgccatgggccattggtgcgtcattggtcaaaccaggtgaaaaggtcgtgtcagtcagtggagatggtggcttcttattcagtgctatggaattagaaaccgctgtgcggttgaaggcaccgattgtgcatattgtgtggaacgatagtacttatgatatggtcgcatttcaacagttgaagaaatataatcgtacctcagcagtggattttggtaatatcgatattgtcaagtatgccgaaagttttggtgccaccggtttgcgtgtcgaatcaccagatcaattagctgatgtcttgcgtcaaggtatgaatgcggaaggcccagttattattgatgtgccagttgattacagtgataacattaatttagctagtgataagttgccgaaagaatttggtgaattaatgaagacgaaagcgttataa

SEQ ID NO: 255 - DNA, 54 bp, artificial sequence
  primer
ctgagcggccgcatataggaggaatttttgtaatgttgaccaaggctaccaaag

SEQ ID NO: 256 - DNA, 32 bp, artificial sequence
  primer
cgtcgtcgacttataacgctttcgtcttcatt

SEQ ID NO: 257 - DNA, 1401 bp, Escherichia coli
atgccacattcctacgattacgatgccatagtaataggttccggccccggcggcgaaggcgctgcaatgggcctggttaagcaaggtgcgcgcgtcgcagttatcgagcgttatcaaaatgttggcggcggttgcacccactggggcaccatcccgtcgaaagctctccgtcacgccgtcagccgcattatagaattcaatcaaaacccactttacagcgaccattcccgactgctccgctcttcttttgccgatatccttaaccatgccgataacgtgattaatcaacaaacgcgcatgcgtcagggattttacgaacgtaatcactgtgaaatattgcagggaaacgctcgctttgttgacgagcatacgttggcgctggattgcccggacggcagcgttgaaacactaaccgctgaaaaatttgttattgcctgcggctctcgtccatatcatccaacagatgttgatttcacccatccacgcatttacgacagcgactcaattctcagcatgcaccacgaaccgcgccatgtacttatctatggtgctggagtgatcggctgtgaatatgcgtcgatcttccgcggtatggatgtaaaagtggatctgatcaacacccgcgatcgcctgctggcatttctcgatcaagagatgtcagattctctctcctatcacttctggaacagtggcgtagtgattcgtcacaacgaagagtacgagaagatcgaaggctgtgacgatggtgtgatcatgcatctgaagtcgggtaaaaaactgaaagctgactgcctgctctatgccaacggtcgcaccggtaataccgattcgctggcgttacagaacattgggctagaaactgacagccgcggacagctgaaggtcaacagcatgtatcagaccgcacagccacacgtttacgcggtgggcgacgtgattggttatccgagcctggcgtcggcggcctatgaccaggggcgcattgccgcgcaggcgctggtaaaaggcgaagccaccgcacatctgattgaagatatccctaccggtatttacaccatcccggaaatcagctctgtgggcaaaaccgaacagcagctgaccgcaatgaaagtgccatatgaagtgggccgcgcccagtttaaacatctggcacgcgcacaaatcgtcggcatgaacgtgggcacgctgaaaattttgttccatcgggaaacaaaagagattctgggtattcactgctttggcgagcgcgctgccgaaattattcatatcggtcaggcgattatggaacagaaaggtggcggcaacactattgagtacttcgtcaacaccacctttaactacccgacgatggcggaagcctatcgggtagctgcgttaaacggtttaaaccgcctgttttaa

SEQ ID NO: 258 - protein, 466 aa, Escherichia coli
MPHSYDYDAIVIGSGPGGEGAAMGLVKQGARVAVIERYQNVGGGCTHWGTIPSKALRHAVSRIIEFNQNPLYSDHSRLLRSSFADILNHADNVINQQTRMRQGFYERNHCEILQGNARFVDEHTLALDCPDGSVETLTAEKFVIACGSRPYHPTDVDFTHPRIYDSDSILSMHHEPRHVLIYGAGVIGCEYASIFRGMDVKVDLINTRDRLLAFLDQEMSDSLSYHFWNSGVVIRHNEEYEKIEGCDDGVIMHLKSGKKLKADCLLYANGRTGNTDSLALQNIGLETDSRGQLKVNSMYQTAQPHVYAVGDVIGYPSLASAAYDQGRIAAQALVKGEATAHLIEDIPTGIYTIPEISSVGKTEQQLTAMKVPYEVGRAQFKHLARAQIVGMNVGTLKILFHRETKEILGIHCFGERAAEIIHIGQAIMEQKGGGNTIEYFVNTTFNYPTMAEAYRVAALNGLNRLF

SEQ ID NO: 259 - protein, 760 aa, Escherichia coli
MSELNEKLATAWEGFTKGDWQNEVNVRDFIQKNYTPYEGDESFLAGATEATTTLWDKVMEGVKLENRTHAPVDFDTAVASTITSHDAGYINKQLEKIVGLQTEAPLKRALIPFGGIKMIEGSCKAYNRELDPMIKKIFTEYRKTHNQGVFDVYTPDILRCRKSGVLTGLPDAYGRGRIIGDYRRVALYGIDYLMKDKLAQFTSLQADLENGVNLEQTIRLREEIAEQHRALGQMKEMAAKYGYDISGPATNAQEAIQWTYFGYLAAVKSQNGAAMSFGRTSTFLDVYIERDLKAGKITEQEAQEMVDHLVMKLRMVRFLRTPEYDELFSGDPIWATESIGGMGLDGRTLVTKNSFRFLNTLYTMGPSPEPNMTILWSEKLPLNFKKFAAKVSIDTSSLQYENDDLMRPDFNNDDYAIACCVSPMIVGKQMQFFGARANLAKTMLYAINGGVDEKLKMQVGPKSEPIKGDVLNYDEVMERMDHFMDWLAKQYITALNIIHYMHDKYSYEASLMALHDRDVIRTMACGIAGLSVAADSLSAIKYAKVKPIRDEDGLAIDFEIEGEYPQFGNNDPRVDDLAVDLVERFMKKIQKLHTYRDAIPTQSVLTITSNVVYGKKTGNTPDGRRAGAPFGPGANPMHGRDQKGAVASLTSVAKLPFAYAKDGISYTFSIVPNALGKDDEVRKTNLAGLMDGYFHHEASIEGGQHLNVNVMNREMLLDAMENPEKYPQLTIRVSGYAVRFNSLTKEQQQDVITRTFTQSM

SEQ ID NO: 260 - DNA, 2283 bp, Escherichia coli
atgtccgagcttaatgaaaagttagccacagcctgggaaggttttaccaaaggtgactggcagaatgaagtaaacgtccgtgacttcattcagaaaaactacactccgtacgagggtgacgagtccttcctggctggcgctactgaagcgaccaccaccctgtgggacaaagtaatggaaggcgttaaactggaaaaccgcactcacgcgccagttgactttgacaccgctgttgcttccaccatcacctctcacgacgctggctacatcaacaagcagcttgagaaaatcgttggtctgcagactgaagctccgctgaaacgtgctcttatcccgttcggtggtatcaaaatgatcgaaggttcctgcaaagcgtacaaccgcgaactggatccgatgatcaaaaaaatcttcactgaataccgtaaaactcacaaccagggcgtgttcgacgtttacactccggacatcctgcgttgccgtaaatctggtgttctgaccggtctgccagatgcatatggccgtggccgtatcatcggtgactaccgtcgcgttgcgctgtacggtatcgactacctgatgaaagacaaactggcacagttcacttctctgcaggctgatctggaaaacggcgtaaacctggaacagactatccgtctgcgcgaagaaatcgctgaacagcaccgcgctctgggtcagatgaaagaaatggctgcgaaatacggctacgacatctctggtccggctaccaacgctcaggaagctatccagtggacttacttcggctacctggctgctgttaagtctcagaacggtgctgcaatgtccttcggtcgtacctccaccttcctggatgtgtacatcgaacgtgacctgaaagctggcaagatcaccgaacaagaagcgcaggaaatggttgaccacctggtcatgaaactgcgtatggttcgcttcctgcgtactccggaatacgatgaactgttctctggcgacccgatctgggcaaccgaatctatcggtggtatgggcctcgacggtcgtaccctggttaccaaaaacagcttccgtttcctgaacaccctgtacaccatgggtccgtctccggaaccgaacatgaccattctgtggtctgaaaaactgccgctgaacttcaagaaattcgccgctaaagtgtccatcgacacctcttctctgcagtatgagaacgatgacctgatgcgtccggacttcaacaacgatgactacgctattgcttgctgcgtaagcccgatgatcgttggtaaacaaatgcagttcttcggtgcgcgtgcaaacctggcgaaaaccatgctgtacgcaatcaacggcggcgttgacgaaaaactgaaaatgcaggttggtccgaagtctgaaccgatcaaaggcgatgtcctgaactatgatgaagtgatggagcgcatggatcacttcatggactggctggctaaacagtacatcactgcactgaacatcatccactacatgcacgacaagtacagctacgaagcctctctgatggcgctgcacgaccgtgacgttatccgcaccatggcgtgtggtatcgctggtctgtccgttgctgctgactccctgtctgcaatcaaatatgcgaaagttaaaccgattcgtgacgaagacggtctggctatcgacttcgaaatcgaaggcgaatacccgcagtttggtaacaatgatccgcgtgtagatgacctggctgttgacctggtagaacgtttcatgaagaaaattcagaaactgcacacctaccgtgacgctatcccgactcagtctgttctgaccatcacttctaacgttgtgtatggtaagaaaacgggtaacaccccagacggtcgtcgtgctggcgcgccgttcggaccgggtgctaacccgatgcacggtcgtgaccagaaaggtgcagtagcctctctgacttccgttgctaaactgccgtttgcttacgctaaagatggtatctcctacaccttctctatcgttccgaacgcactgggtaaagacgacgaagttcgtaagaccaacctggctggtctgatggatggttacttccaccacgaagcatccatcgaaggtggtcagcacctgaacgttaacgtgatgaaccgtgaaatgctgctcgacgcgatggaaaacccggaaaaatatccgcagctgaccatccgtgtatctggctacgcagtacgtttcaactcgctgactaaagaacagcagcaggacgttattactcgtaccttcactcaatctatgtaa

SEQ ID NO: 261 - protein, 602 aa, Escherichia coli
MQTFQADLAIVGAGGAGLRAAIAAAQANPNAKIALISKVYPMRSHTVAAEGGSAAVAQDHDSFEYHFHDTVAGGDWLCEQDVVDYFVHHCPTEMTQLELWGCPWSRRPDGSVNVRRFGGMKIERTWFAADKTGFHMLHTLFQTSLQFPQIQRFDEHFVLDILVDDGHVRGLVAMNMMEGTLVQIRANAVVMATGGAGRVYRYNTNGGIVTGDGMGMALSHGVPLRDMEFVQYHPTGLPGSGILMTEGCRGEGGILVNKNGYRYLQDYGMGPETPLGEPKNKYMELGPRDKVSQAFWHEWRKGNTISTPRGDVVYLDLRHLGEKKLHERLPFICELAKAYVGVDPVKEPIPVRPTAHYTMGGIETDQNCETRIKGLFAVGECSSVGLHGANRLGSNSLAELVVFGRLAGEQATERAATAGNGNEAAIEAQAAGVEQRLKDLVNQDGGENWAKIRDEMGLAMEEGCGIYRTPELMQKTIDKLAELQERFKRVRITDTSSVFNTDLLYTIELGHGLNVAECMAHSAMARKESRGAHQRLDEGCTERDDVNFLKHTLAFRDADGTTRLEYSDVKITTLPPAKRVYGGEADAADKAEAANKKEKANG

SEQ ID NO: 262 - DNA, 1809 bp, Escherichia coli
gtgcaaacctttcaagccgatcttgccattgtaggcgccggtggcgcgggattacgtgctgcaattgctgccgcgcaggcaaatccgaatgcaaaaatcgcactaatctcaaaagtatacccgatgcgtagccataccgttgctgcagaagggggctccgccgctgtcgcgcaggatcatgacagcttcgaatatcactttcacgatacagtagcgggtggcgactggttgtgtgagcaggatgtcgtggattatttcgtccaccactgcccaaccgaaatgacccaactggaactgtggggatgcccatggagccgtcgcccggatggtagcgtcaacgtacgtcgcttcggcggcatgaaaatcgagcgcacctggttcgccgccgataagaccggcttccatatgctgcacacgctgttccagacctctctgcaattcccgcagatccagcgttttgacgaacatttcgtgctggatattctggttgatgatggtcatgttcgcggcctggtagcaatgaacatgatggaaggcacgctggtgcagatccgtgctaacgcggtcgttatggctactggcggtgcgggtcgcgtttatcgttacaacaccaacggcggcatcgttaccggtgacggtatgggtatggcgctaagccacggcgttccgctgcgtgacatggaattcgttcagtatcacccaaccggtctgccaggttccggtatcctgatgaccgaaggttgccgcggtgaaggcggtattctggtcaacaaaaatggctaccgttatctgcaagattacggcatgggcccggaaactccgctgggcgagccgaaaaacaaatatatggaactgggtccacgcgacaaagtctctcaggccttctggcacgaatggcgtaaaggcaacaccatctccacgccgcgtggcgatgtggtttatctcgacttgcgtcacctcggcgagaaaaaactgcatgaacgtctgccgttcatctgcgaactggcgaaagcgtacgttggcgtcgatccggttaaagaaccgattccggtacgtccgaccgcacactacaccatgggcggtatcgaaaccgatcagaactgtgaaacccgcattaaaggtctgttcgccgtgggtgaatgttcctctgttggtctgcacggtgcaaaccgtctgggttctaactccctggcggaactggtggtcttcggccgtctggccggtgaacaagcgacagagcgtgcagcaactgccggtaatggcaacgaagcggcaattgaagcgcaggcagctggcgttgaacaacgtctgaaagatctggttaaccaggatggcggcgaaaactgggcgaagatccgcgacgaaatgggcctggctatggaagaaggctgcggtatctaccgtacgccggaactgatgcagaaaaccatcgacaagctggcagagctgcaggaacgcttcaagcgcgtgcgcatcaccgacacttccagcgtgttcaacaccgacctgctctacaccattgaactgggccacggtctgaacgttgctgaatgtatggcgcactccgcaatggcacgtaaagagtcccgcggcgcgcaccagcgtctggacgaaggttgcaccgagcgtgacgacgtcaacttcctcaaacacaccctcgccttccgcgatgctgatggcacgactcgcctggagtacagcgacgtgaagattactacgctgccgccagctaaacgcgtttacggtggcgaagcggatgcagccgataaggcggaagcagccaataagaaggagaaggcgaatggctga

SEQ ID NO: 263 - protein, 244 aa, Escherichia coli
MAEMKNLKIEVVRYNPEVDTAPHSAFYEVPYDATTSLLDALGYIKDNLAPDLSYRWSCRMAICGSCGMMVNNVPKLACKTFLRDYTDGMKVEALANFPIERDLVVDMTHFIESLEAIKPYIIGNSRTADQGTNIQTPAQMAKYHQFSGCINCGLCYAACPQFGLNPEFIGPAAITLAHRYNEDSRDHGKKERMAQLNSQNGVWSCTFVGYCSEVCPKHVDPAAAIQQGKVESSKDFLIATLKPR

SEQ ID NO: 264 - DNA, 735 bp, Escherichia coli
atggctgagatgaaaaacctgaaaattgaggtggtgcgctataacccggaagtcgataccgcaccgcatagcgcattctatgaagtgccttatgacgcaactacctcattactggatgcgctgggctacatcaaagacaacctggcaccggacctgagctaccgctggtcctgccgtatggcgatttgtggttcctgcggcatgatggttaacaacgtgccaaaactggcatgtaaaaccttcctgcgtgattacaccgacggtatgaaggttgaagcgttagctaacttcccgattgaacgcgatctggtggtcgatatgacccacttcatcgaaagtctggaagcgatcaaaccgtacatcatcggcaactcccgcaccgcggatcagggtactaacatccagaccccggcgcagatggcgaagtatcaccagttctccggttgcatcaactgtggtttgtgctacgccgcgtgcccgcagtttggcctgaacccagagttcatcggtccggctgccattacgctggcgcatcgttataacgaagatagccgcgaccacggtaagaaggagcgtatggcgcagttgaacagccagaacggcgtatggagctgtactttcgtgggctactgctccgaagtctgcccgaaacacgtcgatccggctgcggccattcagcagggcaaagtagaaagttcgaaagactttcttatcgcgaccctgaaaccacgctaa

SEQ ID NO: 265 - protein, 131 aa, Escherichia coli
MTTKRKPYVRPMTSTWWKKLPFYRFYMLREGTAVPAVWFSIELIFGLFALKNGPEAWAGFVDFLQNPVIVIINLITLAAALLHTKTWFELAPKAANIIVKDEKMGPEPIIKSLWAVTVVATIVILFVALYW

SEQ ID NO: 266 - DNA, 396 bp, Escherichia coli
atgacgactaaacgtaaaccgtatgtacggccaatgacgtccacctggtggaaaaaattgccgttttatcgcttttacatgctgcgcgaaggcacggcggttccggctgtgtggttcagcattgaactgattttcgggctgtttgccctgaaaaatggcccggaagcctgggcgggattcgtcgactttttacaaaacccggttatcgtgatcattaacctgatcactctggcggcagctctgctgcacaccaaaacctggtttgaactggcaccgaaagcggccaatatcattgtaaaagacgaaaaaatgggaccagagccaattatcaaaagtctctgggcggtaactgtggttgccaccatcgtaatcctgtttgttgccctgtactggtaa

SEQ ID NO: 267 - protein, 119 aa, Escherichia coli
MINPNPKRSDEPVFWGLFGAGGMWSAIIAPVMILLVGILLPLGLFPGDALSYERVLAFAQSFIGRVFLFLMIVLPLWCGLHRMHHAMHDLKIHVPAGKWVFYGLAAILTVVTLIGVVTI

SEQ ID NO: 268 - DNA, 360 bp, Escherichia coli
atgattaatccaaatccaaagcgttctgacgaaccggtattctggggcctcttcggggccggtggtatgtggagcgccatcattgcgccggtgatgatcctgctggtgggtattctgctgccactggggttgtttccgggtgatgcgctgagctacgagcgcgttctggcgttcgcgcagagcttcattggtcgcgtattcctgttcctgatgatcgttctgccgctgtggtgtggtttacaccgtatgcaccacgcgatgcacgatctgaaaatccacgtacctgcgggcaaatgggttttctacggtctggctgctatcctgacagttgtcacgctgattggtgtcgttacaatctaa

SEQ ID NO: 269 - protein, 891 aa, Escherichia coli
MAVTNVAELNALVERVKKAQREYASFTQEQVDKIFRAAALAAADARIPLAKMAVAESGMGIVEDKVIKNHFASEYIYNAYKDEKTCGVLSEDDTFGTITIAEPIGIICGIVPTTNPTSTAIFKSLISLKTRNAIIFSPHPRAKDATNKAADIVLQAAIAAGAPKDLIGWIDQPSVELSNALMHHPDINLILATGGPGMVKAAYSSGKPAIGVGAGNTPVVIDETADIKRAVASVLMSKTFDNGVICASEQSVVVVDSVYDAVRERFATHGGYLLQGKELKAVQDVILKNGALNAAIVGQPAYKIAELAGFSVPENTKILIGEVTVVDESEPFAHEKLSPTLAMYRAKDFEDAVEKAEKLVAMGGIGHTSCLYTDQDNQPARVSYFGQKMKTARILINTPASQGGIGDLYNFKLAPSLTLGCGSWGGNSISENVGPKHLINKKTVAKRAENMLWHKLPKSIYFRRGSLPIALDEVITDGHKRALIVTDRFLFNNGYADQITSVLKAAGVETEVFFEVEADPTLSIVRKGAELANSFKPDVIIALGGGSPMDAAKIMWVMYEHPETHFEELALRFMDIRKRIYKFPKMGVKAKMIAVTTTSGTGSEVTPFAVVTDDATGQKYPLADYALTPDMAIVDANLVMDMPKSLCAFGGLDAVTHAMEAYVSVLASEFSDGQALQALKLLKEYLPASYHEGSKNPVARERVHSAATIAGIAFANAFLGVCHSMAHKLGSQFHIPHGLANALLICNVIRYNANDNPTKQTAFSQYDRPQARRRYAEIADHLGLSAPGDRTAAKIEKLLAWLETLKAELGIPKSIREAGVQEADFLANVDKLSEDAFDDQCTGANPRYPLISELKQILLDTYYGRDYVEGETAAKKEAAPAKAEKKAKKSA

SEQ ID NO: 270 - DNA, 2676 bp, Escherichia coli
atggctgttactaatgtcgctgaacttaacgcactcgtagagcgtgtaaaaaaagcccagcgtgaatatgccagtttcactcaagagcaagtagacaaaatcttccgcgccgccgctctggctgctgcagatgctcgaatcccactcgcgaaaatggccgttgccgaatccggcatgggtatcgtcgaagataaagtgatcaaaaaccactttgcttctgaatatatctacaacgcctataaagatgaaaaaacctgtggtgttctgtctgaagacgacacttttggtaccatcactatcgctgaaccaatcggtattatttgcggtatcgttccgaccactaacccgacttcaactgctatcttcaaatcgctgatcagtctgaagacccgtaacgccattatcttctccccgcacccgcgtgcaaaagatgccaccaacaaagcggctgatatcgttctgcaggctgctatcgctgccggtgctccgaaagatctgatcggctggatcgatcaaccttctgttgaactgtctaacgcactgatgcaccacccagacatcaacctgatcctcgcgactggtggtccgggcatggttaaagccgcatacagctccggtaaaccagctatcggtgtaggcgcgggcaacactccagttgttatcgatgaaactgctgatatcaaacgtgcagttgcatctgtactgatgtccaaaaccttcgacaacggcgtaatctgtgcttctgaacagtctgttgttgttgttgactctgtttatgacgctgtacgtgaacgttttgcaacccacggcggctatctgttgcagggtaaagagctgaaagctgttcaggatgttatcctgaaaaacggtgcgctgaacgcggctatcgttggtcagccagcctataaaattgctgaactggcaggcttctctgtaccagaaaacaccaagattctgatcggtgaagtgaccgttgttgatgaaagcgaaccgttcgcacatgaaaaactgtccccgactctggcaatgtaccgcgctaaagatttcgaagacgcggtagaaaaagcagagaaactggttgctatgggcggtatcggtcatacctcttgcctgtacactgaccaggataaccaaccggctcgcgtttcttacttcggtcagaaaatgaaaacggcgcgtatcctgattaacaccccagcgtctcagggtggtatcggtgacctgtataacttcaaactcgcaccttccctgactctgggttgtggttcttggggtggtaactccatctctgaaaacgttggtccgaaacacctgatcaacaagaaaaccgttgctaagcgagctgaaaacatgttgtggcacaaacttccgaaatctatctacttccgccgtggctccctgccaatcgcgctggatgaagtgattactgatggccacaaacgtgcgctcatcgtgactgaccgcttcctgttcaacaatggttatgctgatcagatcacttccgtactgaaagcagcaggcgttgaaactgaagtcttcttcgaagtagaagcggacccgaccctgagcatcgttcgtaaaggtgcagaactggcaaactccttcaaaccagacgtgattatcgcgctgggtggtggttccccgatggacgccgcgaagatcatgtgggttatgtacgaacatccggaaactcacttcgaagagctggcgctgcgctttatggatatccgtaaacgtatctacaagttcccgaaaatgggcgtgaaagcgaaaatgatcgctgtcaccaccacttctggtacaggttctgaagtcactccgtttgcggttgtaactgacgacgctactggtcagaaatatccgctggcagactatgcgctgactccggatatggcgattgtcgacgccaacctggttatggacatgccgaagtccctgtgtgctttcggtggtctggacgcagtaactcacgccatggaagcttatgtttctgtactggcatctgagttctctgatggtcaggctctgcaggcactgaaactgctgaaagaatatctgccagcgtcctaccacgaagggtctaaaaatccggtagcgcgtgaacgtgttcacagtgcagcgactatcgcgggtatcgcgtttgcgaacgccttcctgggtgtatgtcactcaatggcgcacaaactgggttcccagttccatattccgcacggtctggcaaacgccctgctgatttgtaacgttattcgctacaatgcgaacgacaacccgaccaagcagactgcattcagccagtatgaccgtccgcaggctcgccgtcgttatgctgaaattgccgaccacttgggtctgagcgcaccgggcgaccgtactgctgctaagatcgagaaactgctggcatggctggaaacgctgaaagctgaactgggtattccgaaatctatccgtgaagctggcgttcaggaagcagacttcctggcgaacgtggataaactgtctgaagatgcattcgatgaccagtgcaccggcgctaacccgcgttacccgctgatctccgagctgaaacagattctgctggatacctactacggtcgtgattatgtagaaggtgaaactgcagcgaagaaagaagctgctccggctaaagctgagaaaaaagcgaaaaaatccgcttaa

SEQ ID NO: 271 - protein, 329 aa, Escherichia coli
MKLAVYSTKQYDKKYLQQVNESFGFELEFFDFLLTEKTAKTANGCEAVCIFVNDDGSRPVLEELKKHGVKYIALRCAGFNNVDLDAAKELGLKVVRVPAYDPEAVAEHAIGMMMTLNRRIHRAYQRTRDANFSLEGLTGFTMYGKTAGVIGTGKIGVAMLRILKGFGMRLLAFDPYPSAAALELGVEYVDLPTLFSESDVISLHCPLTPENYHLLNEAAFEQMKNGVMIVNTSRGALIDSQAAIEALKNQKIGSLGMDVYENERDLFFEDKSNDVIQDDVFRRLSACHNVLFTGHQAFLTAEALTSISQTTLQNLSNLEKGETCPNELV

SEQ ID NO: 272 - DNA, 990 bp, Escherichia coli
atgaaactcgccgtttatagcacaaaacagtacgacaagaagtacctgcaacaggtgaacgagtcctttggctttgagctggaattttttgactttctgctgacggaaaaaaccgctaaaactgccaatggctgcgaagcggtatgtattttcgtaaacgatgacggcagccgcccggtgctggaagagctgaaaaagcacggcgttaaatatatcgccctgcgctgtgccggtttcaataacgtcgaccttgacgcggcaaaagaactggggctgaaagtagtccgtgttccagcctatgatccagaggccgttgctgaacacgccatcggtatgatgatgacgctgaaccgccgtattcaccgcgcgtatcagcgtacccgtgatgctaacttctctctggaaggtctgaccggctttactatgtatggcaaaacggcaggcgttatcggtaccggtaaaatcggtgtggcgatgctgcgcattctgaaaggttttggtatgcgtctgctggcgttcgatccgtatccaagtgcagcggcgctggaactcggtgtggagtatgtcgatctgccaaccctgttctctgaatcagacgttatctctctgcactgcccgctgacaccggaaaactatcatctgttgaacgaagccgccttcgaacagatgaaaaatggcgtgatgatcgtcaataccagtcgcggtgcattgattgattctcaggcagcaattgaagcgctgaaaaatcagaaaattggttcgttgggtatggacgtgtatgagaacgaacgcgatctattctttgaagataaatccaacgacgtgatccaggatgacgtattccgtcgcctgtctgcctgccacaacgtgctgtttaccgggcaccaggcattcctgacagcagaagctctgaccagtatttctcagactacgctgcaaaacttaagcaatctggaaaaaggcgaaacctgcccgaacgaactggtttaa

SEQ ID NO: 273 - DNA, 999 bp, Lactobacillus plantarum
atgaaaattattgcatatgctgtacgtgatgacgaacgtccattcttcgatacttggatgaaagaaaacccagatgttgaagttaaattagttccagaattacttactgaagacaacgttgacttagctaaaggcttcgacggtgccgatgtataccaacaaaaggactatactgctgaagtattgaacaagttagccgacgaaggggttaagaacatctctcttcgtaacgttggtgttgataacttggacgttcctactgttaaagcacgtggcttaaacatttctaacgtacctgcatactcaccaaatgcgattgctgaattatcagtaacgcaattgatgcaattattacgtcaaaccccattgttcaataagaagttagctaagcaagacttccgttgggcaccagatattgccaaggaattaaacaccatgactgttggtgttatcggtactggtcggattggccgtgctgccatcgatattttcaaaggcttcggcgctaaggttatcggttacgatgtttaccggaatgctgaacttgaaaaggaaggcatgtacgttgacaccttggacgaattatacgcccaagctgatgttatcacgttacacgttcctgcattgaaggataactaccacatgttgaatgcggatgccttcagcaagatgaaagatggcgcctacatcttgaactttgctcgtgggacactcatcgattcagaagacttgatcaaagccttagacagtggcaaagttgccggtgccgctcttgatacgtatgaatacgaaactaagatcttcaacaaagaccttgaaggtcaaacgattgatgacaaggtcttcatgaacttgttcaaccgcgacaatgttttgattacaccacatacggctttctacactgaaactgccgttcacaacatggtgcacgtttcaatgaacagtaacaaacaattcatcgaaactggtaaagctgatacgcaagttaagtttgactaa

SEQ ID NO: 274 - protein, 332 aa, Lactobacillus plantarum
MKIIAYAVRDDERPFFDTWMKENPDVEVKLVPELLTEDNVDLAKGFDGADVYQQKDYTAEVLNKLADEGVKNISLRNVGVDNLDVPTVKARGLNISNVPAYSPNAIAELSVTQLMQLLRQTPLFNKKLAKQDFRWAPDIAKELNTMTVGVIGTGRIGRAAIDIFKGFGAKVIGYDVYRNAELEKEGMYVDTLDELYAQADVITLHVPALKDNYHMLNADAFSKMKDGAYILNFARGTLIDSEDLIKALDSGKVAGAALDTYEYETKIFNKDLEGQTIDDKVFMNLFNRDNVLITPHTAFYTETAVHNMVHVSMNSNKQFIETGKADTQVKFD

SEQ ID NO: 275 - DNA, 963 bp, Lactobacillus plantarum
ttgtcaagcatgccaaatcatcaaaaagttgtgttagtcggcgacggcgctgttggttctagttacgcttttgccatggcacaacaaggaattgctgaagaatttgtaattgtcgatgttgttaaagatcggacaaagggtgacgcccttgatcttgaagacgcccaagcattcaccgctcccaagaagatttactcaggcgaatattcagattgtaaggacgctgacttagttgttattacagccggtgcgcctcaaaagcctggtgaatcacgtttagacttagttaacaagaatttaaatatcctatcatccattgtcaaaccagttgttgactccggctttgacggcatcttcttagttgctgctaaccctgttgacatcttaacttacgctacttggaaattctcaggtttcccaaaggatcgtgtcattggttcagggacttccttagactcttcacgtttacgcgttgcgttaggcaaacaattcaatgttgatcctcgttccgttgatgcttacatcatgggtgaacacggtgattctgaatttgctgcttactcaactgcaaccatcgggacacgtccagttcgcgatgtcgctaaggaacaaggcgtttctgacgaagatttagccaagttagaagacggtgttcgtaacaaagcttacgacatcatcaacttgaagggtgccacgttctacggtatcgggactgctttaatgcggatttccaaagccattttacgtgatgaaaatgccgttttaccagtaggtgcctacatggacggccaatacggcttaaacgacatttatatcgggactccggctgtgattggtggaactggtttgaaacaaatcatcgaatcaccactttcagctgacgaactcaagaagatgcaagattccgccgcaactttgaaaaaagtgcttaacgacggtttagctgaattagaaaataaataa

SEQ ID NO: 276 - protein, 320 aa, Lactobacillus plantarum
MSSMPNHQKVVLVGDGAVGSSYAFAMAQQGIAEEFVIVDVVKDRTKGDALDLEDAQAFTAPKKIYSGEYSDCKDADLVVITAGAPQKPGESRLDLVNKNLNILSSIVKPVVDSGFDGIFLVAANPVDILTYATWKFSGFPKDRVIGSGTSLDSSRLRVALGKQFNVDPRSVDAYIMGEHGDSEFAAYSTATIGTRPVRDVAKEQGVSDEDLAKLEDGVRNKAYDIINLKGATFYGIGTALMRISKAILRDENAVLPVGAYMDGQYGLNDIYIGTPAVIGGTGLKQIIESPLSADELKKMQDSAATLKKVLNDGLAELENK

SEQ ID NO: 277 - DNA, 930 bp, Lactobacillus plantarum
atggataagaagcaacgcaaagtcgtaattgttggtgatggctcggtgggttcatcatttgccttttcattggtccaaaattgcgccctagatgaactcgttatcgttgacttggttaaaacgcacgcagagggggacgttaaggatttggaagatgttgccgcctttacgaatgcgaccaacattcataccggtgaatatgcggatgcgcgtgatgctgacatcgttgtcattacggctggtgtgcctcgtaagcctggtgagagtcgtttagatttgattaaccgcaatacgaagattctggaatccatcgtcaaaccagtggttgcgagtggttttaatggttgcttcgttatctcaagtaatcccgtcgatattttgacttcgatgacgcaacgtttatccggttttccacggcatcgggtcattggtaccgggacttccttggatacggcgcggttacgggtcgccttggctcagaagttgaatgttgccaccactgcagttgatgctgcggtacttggagaacatggtgatagttccatcgttaattttgatgaaattatgatcaatgctcagcccttaaagacggtcacaacggtcgatgatcagttcaaagctgaaatcgagcaagctgttcgtggtaaaggtggtcaaatcattagtcagaagggggccacgttctatggggtcgccgttagtttgatgcaaatctgccgagcaattttgaacgatgaaaatgctgagttgattgtctccgccgctttgtctggtcaatatggcattaacgatttgtacttggggtcacccgccattattaaccgcaacgggctccaaaaagtgatcgaagctgagctatcagatgatgagcgtgcccggatgcaacatttcgcagccaagatgctgaccatgatgaatgtggcatcataa

SEQ ID NO: 278 - protein, 309 aa, Lactobacillus plantarum
MDKKQRKVVIVGDGSVGSSFAFSLVQNCALDELVIVDLVKTHAEGDVKDLEDVAAFTNATNIHTGEYADARDADIVVITAGVPRKPGESRLDLINRNTKILESIVKPVVASGFNGCFVISSNPVDILTSMTQRLSGFPRHRVIGTGTSLDTARLRVALAQKLNVATTAVDAAVLGEHGDSSIVNFDEIMINAQPLKTVTTVDDQFKAEIEQAVRGKGGQIISQKGATFYGVAVSLMQICRAILNDENAELIVSAALSGQYGINDLYLGSPAIINRNGLQKVIEAELSDDERARMQHFAAKMLTMMNVAS

SEQ ID NO: 279 - DNA, 1692 bp, Saccharomyces cerevisiae
  CDS (1)..(1692)
atgtctgaaattactttgggtaaatatttgttcgaaagattaaagcaagtcaacgttaacaccgttttcggtttgccaggtgacttcaacttgtccttgttggacaagatctacgaagttgaaggtatgagatgggctggtaacgccaacgaattgaacgctgcttacgccgctgatggttacgctcgtatcaagggtatgtcttgtatcatcaccaccttcggtgtcggtgaattgtctgctttgaacggtattgccggttcttacgctgaacacgtcggtgttttgcacgttgttggtgtcccatccatctctgctcaagctaagcaattgttgttgcaccacaccttgggtaacggtgacttcactgttttccacagaatgtctgccaacatttctgaaaccactgctatgatcactgacattgctaccgccccagctgaaattgacagatgtatcagaaccacttacgtcacccaaagaccagtctacttaggtttgccagctaacttggtcgacttgaacgtcccagctaagttgttgcaaactccaattgacatgtctttgaagccaaacgatgctgaatccgaaaaggaagtcattgacaccatcttggctttggtcaaggatgctaagaacccagttatcttggctgatgcttgttgttccagacacgacgtcaaggctgaaactaagaagttgattgacttgactcaattcccagctttcgtcaccccaatgggtaagggttccattgacgaacaacacccaagatacggtggtgtttacgtcggtaccttgtccaagccagaagttaaggaagccgttgaatctgctgacttgattttgtctgtcggtgctttgttgtctgatttcaacaccggttctttctcttactcttacaagaccaagaacattgtcgaattccactccgaccacatgaagatcagaaacgccactttcccaggtgtccaaatgaaattcgttttgcaaaagttgttgaccactattgctgacgccgctaagggttacaagccagttgctgtcccagctagaactccagctaacgctgctgtcccagcttctaccccattgaagcaagaatggatgtggaaccaattgggtaacttcttgcaagaaggtgatgttgtcattgctgaaaccggtacctccgctttcggtatcaaccaaaccactttcccaaacaacacctacggtatctctcaagtcttatggggttccattggtttcaccactggtgctaccttgggtgctgctttcgctgctgaagaaattgatccaaagaagagagttatcttattcattggtgacggttctttgcaattgactgttcaagaaatctccaccatgatcagatggggcttgaagccatacttgttcgtcttgaacaacgatggttacaccattgaaaagttgattcacggtccaaaggctcaatacaacgaaattcaaggttgggaccacctatccttgttgccaactttcggtgctaaggactatgaaacccacagagtcgctaccaccggtgaatgggacaagttgacccaagacaagtctttcaacgacaactctaagatcagaatgattgaaatcatgttgccagtcttcgatgctccacaaaacttggttgaacaagctaagttgactgctgctaccaacgctaagcaataa

SEQ ID NO: 280 - protein, 563 aa, Saccharomyces cerevisiae
MSEITLGKYLFERLKQVNVNTVFGLPGDFNLSLLDKIYEVEGMRWAGNANELNAAYAADGYARIKGMSCIITTFGVGELSALNGIAGSYAEHVGVLHVVGVPSISAQAKQLLLHHTLGNGDFTVFHRMSANISETTAMITDIATAPAEIDRCIRTTYVTQRPVYLGLPANLVDLNVPAKLLQTPIDMSLKPNDAESEKEVIDTILALVKDAKNPVILADACCSRHDVKAETKKLIDLTQFPAFVTPMGKGSIDEQHPRYGGVYVGTLSKPEVKEAVESADLILSVGALLSDFNTGSFSYSYKTKNIVEFHSDHMKIRNATFPGVQMKFVLQKLLTTIADAAKGYKPVAVPARTPANAAVPASTPLKQEWMWNQLGNFLQEGDVVIAETGTSAFGINQTTFPNNTYGISQVLWGSIGFTTGATLGAAFAAEEIDPKKRVILFIGDGSLQLTVQEISTMIRWGLKPYLFVLNNDGYTIEKLIHGPKAQYNEIQGWDHLSLLPTFGAKDYETHRVATTGEWDKLTQDKSFNDNSKIRMIEIMLPVFDAPQNLVEQAKLTAATNAKQ

SEQ ID NO: 281 - DNA, 1692 bp, Saccharomyces cerevisiae
  CDS (1)..(1692)
atgtctgaaataaccttaggtaaatatttatttgaaagattgagccaagtcaactgtaacaccgtcttcggtttgccaggtgactttaacttgtctcttttggataagctttatgaagtcaaaggtatgagatgggctggtaacgctaacgaattgaacgctgcctatgctgctgatggttacgctcgtatcaagggtatgtcctgtattattaccaccttcggtgttggtgaattgtctgctttgaatggtattgccggttcttacgctgaacatgtcggtgttttgcacgttgttggtgttccatccatctcttctcaagctaagcaattgttgttgcatcataccttgggtaacggtgacttcactgttttccacagaatgtctgccaacatttctgaaaccactgccatgatcactgatattgctaacgctccagctgaaattgacagatgtatcagaaccacctacactacccaaagaccagtctacttgggtttgccagctaacttggttgacttgaacgtcccagccaagttattggaaactccaattgacttgtctttgaagccaaacgacgctgaagctgaagctgaagttgttagaactgttgttgaattgatcaaggatgctaagaacccagttatcttggctgatgcttgtgcttctagacatgatgtcaaggctgaaactaagaagttgatggacttgactcaattcccagtttacgtcaccccaatgggtaagggtgctattgacgaacaacacccaagatacggtggtgtttacgttggtaccttgtctagaccagaagttaagaaggctgtagaatctgctgatttgatattgtctatcggtgctttgttgtctgatttcaataccggttctttctcttactcctacaagaccaaaaatatcgttgaattccactctgaccacatcaagatcagaaacgccaccttcccaggtgttcaaatgaaatttgccttgcaaaaattgttggatgctattccagaagtcgtcaaggactacaaacctgttgctgtcccagctagagttccaattaccaagtctactccagctaacactccaatgaagcaagaatggatgtggaaccatttgggtaacttcttgagagaaggtgatattgttattgctgaaaccggtacttccgccttcggtattaaccaaactactttcccaacagatgtatacgctatcgtccaagtcttgtggggttccattggtttcacagtcggcgctctattgggtgctactatggccgctgaagaacttgatccaaagaagagagttattttattcattggtgacggttctctacaattgactgttcaagaaatctctaccatgattagatggggtttgaagccatacatttttgtcttgaataacaacggttacaccattgaaaaattgattcacggtcctcatgccgaatataatgaaattcaaggttgggaccacttggccttattgccaacttttggtgctagaaactacgaaacccacagagttgctaccactggtgaatgggaaaagttgactcaagacaaggacttccaagacaactctaagattagaatgattgaagttatgttgccagtctttgatgctccacaaaacttggttaaacaagctcaattgactgccgctactaacgctaaacaataa

SEQ ID NO: 282 - protein, 563 aa, Saccharomyces cerevisiae
MSEITLGKYLFERLSQVNCNTVFGLPGDFNLSLLDKLYEVKGMRWAGNANELNAAYAADGYARIKGMSCIITTFGVGELSALNGIAGSYAEHVGVLHVVGVPSISSQAKQLLLHHTLGNGDFTVFHRMSANISETTAMITDIANAPAEIDRCIRTTYTTQRPVYLGLPANLVDLNVPAKLLETPIDLSLKPNDAEAEAEVVRTVVELIKDAKNPVILADACASRHDVKAETKKLMDLTQFPVYVTPMGKGAIDEQHPRYGGVYVGTLSRPEVKKAVESADLILSIGALLSDFNTGSFSYSYKTKNIVEFHSDHIKIRNATFPGVQMKFALQKLLDAIPEVVKDYKPVAVPARVPITKSTPANTPMKQEWMWNHLGNFLREGDIVIAETGTSAFGINQTTFPTDVYAIVQVLWGSIGFTVGALLGATMAAEELDPKKRVILFIGDGSLQLTVQEISTMIRWGLKPYIFVLNNNGYTIEKLIHGPHAEYNEIQGWDHLALLPTFGARNYETHRVATTGEWEKLTQDKDFQDNSKIRMIEVMLPVFDAPQNLVKQAQLTAATNAKQ

SEQ ID NO: 283 - DNA, 1599 bp, Saccharomyces cerevisiae
  CDS (1)..(1599)
atgtctgaaattactcttggaaaatacttatttgaaagattgaagcaagttaatgttaacaccatttttgggctaccaggcgacttcaacttgtccctattggacaagatttacgaggtagatggattgagatgggctggtaatgcaaatgagctgaacgccgcctatgccgccgatggttacgcacgcatcaagggtttatctgtgctggtaactacttttggcgtaggtgaattatccgccttgaatggtattgcaggatcgtatgcagaacacgtcggtgtactgcatgttgttggtgtcccctctatctccgctcaggctaagcaattgttgttgcatcataccttgggtaacggtgattttaccgtttttcacagaatgtccgccaatatctcagaaactacatcaatgattacagacattgctacagccccttcagaaatcgataggttgatcaggacaacatttataacacaaaggcctagctacttggggttgccagcgaatttggtagatctaaaggttcctggttctcttttggaaaaaccgattgatctatcattaaaacctaacgatcccgaagctgaaaaggaagttattgataccgtactagaattgatccagaattcgaaaaaccctgttatactatcggatgcctgtgcttctaggcacaacgttaaaaaagaaacccagaagttaattgatttgacgcaattcccagcttttgtgacacctctaggtaaagggtcaatagatgaacagcatcccagatatggcggtgtttatgtgggaacgctgtccaaacaagacgtgaaacaggccgttgagtcggctgatttgatcctttcggtcggtgctttgctctctgattttaacacaggttcgttttcctactcctacaagactaaaaatgtagtggagtttcattccgattacgtaaaggtgaagaacgctacgttcctcggtgtacaaatgaaatttgcactacaaaacttactgaaggttattcccgatgttgttaagggctacaagagcgttcccgtaccaaccaaaactcccgcaaacaaaggtgtacctgctagcacgcccttgaaacaagagtggttgtggaacgaattgtccaaattcttgcaagaaggtgatgttatcatttccgagaccggcacgtctgccttcggtatcaatcaaactatctttcctaaggacgcctacggtatctcgcaggtgttgtgggggtccatcggttttacaacaggagcaactttaggtgctgcctttgccgctgaggagattgaccccaacaagagagtcatcttattcataggtgacgggtctttgcagttaaccgtccaagaaatctccaccatgatcagatgggggttaaagccgtatctttttgtccttaacaacgacggctacactatcgaaaagctgattcatgggcctcacgcagagtacaacgaaatccagacctgggatcacctcgccctgttgcccgcatttggtgcgaaaaagtacgaaaatcacaagatcgccactacgggtgagtgggatgccttaaccactgattcagagttccagaaaaactcggtgatc

SEQ ID NO: 284 - protein, 533 aa, Saccharomyces cerevisiae
MSEITLGKYLFERLKQVNVNTIFGLPGDFNLSLLDKIYEVDGLRWAGNANELNAAYAADGYARIKGLSVLVTTFGVGELSALNGIAGSYAEHVGVLHVVGVPSISAQAKQLLLHHTLGNGDFTVFHRMSANISETTSMITDIATAPSEIDRLIRTTFITQRPSYLGLPANLVDLKVPGSLLEKPIDLSLKPNDPEAEKEVIDTVLELIQNSKNPVILSDACASRHNVKKETQKLIDLTQFPAFVTPLGKGSIDEQHPRYGGVYVGTLSKQDVKQAVESADLILSVGALLSDFNTGSFSYSYKTKNVVEFHSDYVKVKNATFLGVQMKFALQNLLKVIPDVVKGYKSVPVPTKTPANKGVPASTPLKQEWLWNELSKFLQEGDVIISETGTSAFGINQTIFPKDAYGISQVLWGSIGFTTGATLGAAFAAEEIDPNKRVILFIGDGSLQLTVQEISTMIRWGLKPYLFVLNNDGYTIEKLIHGPHAEYNEIQTWDHLALLPAFGAKKYENHKIATTGEWDALTTDSEFQKNSVI

SEQ ID NO: 285 - DNA, 1695 bp, Candida glabrata
  CDS (1)..(1695)
atgtctgagattactttgggtagatacttgttcgagagattgaaccaagtcgacgttaagaccatcttcggtttgccaggtgacttcaacttgtccctattggacaagatctacgaagttgaaggtatgagatgggctggtaacgctaacgaattgaacgctgcttacgctgctgacggttacgctagaatcaagggtatgtcctgtatcatcaccaccttcggtgtcggtgaattgtctgccttgaacggtattgccggttcttacgctgaacacgtcggtgtcttgcacgtcgtcggtgtcccatccatctcctctcaagctaagcaattgttgttgcaccacaccttgggtaacggtgacttcactgtcttccacagaatgtccgctaacatctctgagaccaccgctatggtcactgacatcgctaccgctccagctgagatcgacagatgtatcagaaccacctacatcacccaaagaccagtctacttgggtctaccagctaacttggtcgacctaaaggtcccagccaagcttttggaaaccccaattgacttgtccttgaagccaaacgacccagaagccgaaactgaagtcgttgacaccgtcttggaattgatcaaggctgctaagaacccagttatcttggctgatgcttgtgcttccagacacgacgtcaaggctgaaaccaagaagttgattgacgccactcaattcccatccttcgttaccccaatgggtaagggttccatcgacgaacaacacccaagattcggtggtgtctacgtcggtaccttgtccagaccagaagttaaggaagctgttgaatccgctgacttgatcttgtctgtcggtgctttgttgtccgatttcaacactggttctttctcttactcttacaagaccaagaacatcgtcgaattccactctgactacatcaagatcagaaacgctaccttcccaggtgtccaaatgaagttcgctttgcaaaagttgttgaacgccgtcccagaagctatcaagggttacaagccagtccctgtcccagctagagtcccagaaaacaagtcctgtgacccagctaccccattgaagcaagaatggatgtggaaccaagtttccaagttcttgcaagaaggtgatgttgttatcactgaaaccggtacctccgcttttggtatcaaccaaaccccattcccaaacaacgcttacggtatctcccaagttctatggggttccatcggtttcaccaccggtgcttgtttgggtgccgctttcgctgctgaagaaatcgacccaaagaagagagttatcttgttcattggtgacggttctttgcaattgactgtccaagaaatctccaccatgatcagatggggcttgaagccatacttgttcgtcttgaacaacgacggttacaccatcgaaagattgattcacggtgaaaaggctggttacaacgacatccaaaactgggaccacttggctctattgccaaccttcggtgctaaggactacgaaaaccacagagtcgccaccaccggtgaatgggacaagttgacccaagacaaggaattcaacaagaactccaagatcagaatgatcgaagttatgttgccagttatggacgctccaacttccttgattgaacaagctaagttgaccgcttccatcaacgctaagcaagaataa

SEQ ID NO: 286 - protein, 564 aa, Candida glabrata
MSEITLGRYLFERLNQVDVKTIFGLPGDFNLSLLDKIYEVEGMRWAGNANELNAAYAADGYARIKGMSCIITTFGVGELSALNGIAGSYAEHVGVLHVVGVPSISSQAKQLLLHHTLGNGDFTVFHRMSANISETTAMVTDIATAPAEIDRCIRTTYITQRPVYLGLPANLVDLKVPAKLLETPIDLSLKPNDPEAETEVVDTVLELIKAAKNPVILADACASRHDVKAETKKLIDATQFPSFVTPMGKGSIDEQHPRFGGVYVGTLSRPEVKEAVESADLILSVGALLSDFNTGSFSYSYKTKNIVEFHSDYIKIRNATFPGVQMKFALQKLLNAVPEAIKGYKPVPVPARVPENKSCDPATPLKQEWMWNQVSKFLQEGDVVITETGTSAFGINQTPFPNNAYGISQVLWGSIGFTTGACLGAAFAAEEIDPKKRVILFIGDGSLQLTVQEISTMIRWGLKPYLFVLNNDGYTIERLIHGEKAGYNDIQNWDHLALLPTFGAKDYENHRVATTGEWDKLTQDKEFNKNSKIRMIEVMLPVMDAPTSLIEQAKLTASINAKQE

SEQ ID NO: 287 - DNA, 1791 bp, Pichia stipitis
  CDS (1)..(1791)
atggctgaagtctcattaggaagatatctcttcgagagattgtaccaattgcaagtgcagaccatcttcggtgtccctggtgatttcaacttgtcgcttttggacaagatctacgaagtggaagatgcccatggcaagaattcgtttagatgggctggtaatgccaacgaattgaatgcatcgtacgctgctgacggttactcgagagtcaagcgtttagggtgtttggtcactacctttggtgtcggtgaattgtctgctttgaatggtattgccggttcttatgccgaacatgttggtttgcttcatgtcgtaggtgttccatcgatttcctcgcaagctaagcaattgttacttcaccacactttgggtaatggtgatttcactgttttccatagaatgtccaacaacatttctcagaccacagcctttatctccgatatcaactcggctccagctgaaattgatagatgtatcagagaggcctacgtcaaacaaagaccagtttatatcgggttaccagctaacttagttgatttgaatgttccggcctctttgcttgagtctccaatcaacttgtcgttggaaaagaacgacccagaggctcaagatgaagtcattgactctgtcttagacttgatcaaaaagtcgctgaacccaatcatcttggtcgatgcctgtgcctcgagacatgactgtaaggctgaagttactcagttgattgaacaaacccaattcccagtatttgtcactccaatgggtaaaggtaccgttgatgagggtggtgtagacggagaattgttagaagatgatcctcatttgattgccaaggtcgctgctaggttgtctgctggcaagaacgctgcctctagattcggaggtgtttatgtcggaaccttgtcgaagcccgaagtcaaggacgctgtagagagtgcagatttgattttgtctgtcggtgcccttttgtctgatttcaacactggttcattttcctactcctacagaaccaagaacatcgtcgaattccattctgattacactaagattagacaagccactttcccaggtgtgcagatgaaggaagccttgcaagaattgaacaagaaagtttcatctgctgctagtcactatgaagtcaagcctgtgcccaagatcaagttggccaatacaccagccaccagagaagtcaagttaactcaggaatggttgtggaccagagtgtcttcgtggttcagagaaggtgatattattatcaccgaaaccggtacatcctccttcggtatagttcaatccagattcccaaacaacaccatcggtatctcccaagtattgtggggttctattggtttctctgttggtgccactttgggtgctgccatggctgcccaagaactcgaccctaacaagagaaccatcttgtttgttggagatggttctttgcaattgaccgttcaggaaatctccaccataatcagatggggtaccacaccttaccttttcgtgttgaacaatgacggttacaccatcgagcgtttgatccacggtgtaaatgcctcatataatgacatccaaccatggcaaaacttggaaatcttgcctactttctcggccaagaactacgacgctgtgagaatctccaacatcggagaagcagaagatatcttgaaagacaaggaattcggaaagaactccaagattagattgatagaagtcatgttaccaagattggatgcaccatctaaccttgccaaacaagctgccattacagctgccaccaacgccgaagcttag

SEQ ID NO: 288 - protein, 596 aa, Pichia stipitis
MAEVSLGRYLFERLYQLQVQTIFGVPGDFNLSLLDKIYEVEDAHGKNSFRWAGNANELNASYAADGYSRVKRLGCLVTTFGVGELSALNGIAGSYAEHVGLLHVVGVPSISSQAKQLLLHHTLGNGDFTVFHRMSNNISQTTAFISDINSAPAEIDRCIREAYVKQRPVYIGLPANLVDLNVPASLLESPINLSLEKNDPEAQDEVIDSVLDLIKKSLNPIILVDACASRHDCKAEVTQLIEQTQFPVFVTPMGKGTVDEGGVDGELLEDDPHLIAKVAARLSAGKNAASRFGGVYVGTLSKPEVKDAVESADLILSVGALLSDFNTGSFSYSYRTKNIVEFHSDYTKIRQATFPGVQMKEALQELNKKVSSAASHYEVKPVPKIKLANTPATREVKLTQEWLWTRVSSWFREGDIIITETGTSSFGIVQSRFPNNTIGISQVLWGSIGFSVGATLGAAMAAQELDPNKRTILFVGDGSLQLTVQEISTIIRWGTTPYLFVLNNDGYTIERLIHGVNASYNDIQPWQNLEILPTFSAKNYDAVRISNIGEAEDILKDKEFGKNSKIRLIEVMLPRLDAPSNLAKQAAITAATNAEA

SEQ ID NO: 289 - DNA, 1710 bp, Pichia stipitis
  CDS (1)..(1710)
atggtatcaacctacccagaatcagaggttactctaggaaggtacctctttgagcgactccaccaattgaaagtggacaccattttcggcttgccgggtgacttcaacctttccttattggacaaagtgtatgaagttccggatatgaggtgggctggaaatgccaacgaattgaatgctgcctatgctgccgatggttactccagaataaagggattgtcttgcttggtcacaacttttggtgttggtgaattgtctgctttaaacggagttggtggtgcctatgctgaacacgtaggacttctacatgtcgttggagttccatccatatcgtcacaggctaaacagttgttgctccaccataccttgggtaatggtgacttcactgtttttcacagaatgtccaatagcatttctcaaactacagcatttctctcagatatctctattgcaccaggtcaaatagatagatgcatcagagaagcatatgttcatcagagaccagtttatgttggtttaccggcaaatatggttgatctcaaggttccttctagtctcttagaaactccaattgatttgaaattgaaacaaaatgatcctgaagctcaagaagttgttgaaacagtcctgaagttggtgtcccaagctacaaaccccattatcttggtagacgcttgtgccctcagacacaattgcaaagaggaagtcaaacaattggttgatgccactaattttcaagtctttacaactccaatgggtaaatctggtatctccgaatctcatccaagattgggcggtgtctatgtcgggacaatgtcgagtcctcaagtcaaaaaagccgttgaaaatgccgatcttatactatctgttggttcgttgttatcggacttcaatacaggttcattttcatactcctacaagacgaagaatgttgttgaattccactctgactatatgaaaatcagacaggccaccttcccaggagttcaaatgaaagaagccttgcaacagttgataaaaagggtctcttcttacatcaatccaagctacattcctactcgagttcctaaaaggaaacagccattgaaagctccatcagaagctcctttgacccaagaatatttgtggtctaaagtatccggctggtttagagagggtgatattatcgtaaccgaaactggtacatctgctttcggaattattcaatcccattttcccagcaacactatcggtatatcccaagtcttgtggggctcaattggtttcacagtaggtgcaacagttggtgctgccatggcagcccaggaaatcgaccctagcaggagagtaattttgttcgtcggtgatggttcattgcagttgacggttcaggaaatctctacgttgtgtaaatgggattgtaacaatacttatctttacgtgttgaacaatgatggttacactatagaaaggttgatccacggcaaaagtgccagctacaacgatatacagccttggaaccatttatccttgcttcgcttattcaatgctaagaaataccaaaatgtcagagtatcgactgctggagaattggactctttgttctctgataagaaatttgcttctccagataggataagaatgattgaggtgatgttatcgagattggatgcaccagcaaatcttgttgctcaagcaaagttgtctgaacgggtaaaccttgaaaattga

SEQ ID NO: 290 - protein, 569 aa, Pichia stipitis
MVSTYPESEVTLGRYLFERLHQLKVDTIFGLPGDFNLSLLDKVYEVPDMRWAGNANELNAAYAADGYSRIKGLSCLVTTFGVGELSALNGVGGAYAEHVGLLHVVGVPSISSQAKQLLLHHTLGNGDFTVFHRMSNSISQTTAFLSDISIAPGQIDRCIREAYVHQRPVYVGLPANMVDLKVPSSLLETPIDLKLKQNDPEAQEVVETVLKLVSQATNPIILVDACALRHNCKEEVKQLVDATNFQVFTTPMGKSGISESHPRLGGVYVGTMSSPQVKKAVENADLILSVGSLLSDFNTGSFSYSYKTKNVVEFHSDYMKIRQATFPGVQMKEALQQLIKRVSSYINPSYIPTRVPKRKQPLKAPSEAPLTQEYLWSKVSGWFREGDIIVTETGTSAFGIIQSHFPSNTIGISQVLWGSIGFTVGATVGAAMAAQEIDPSRRVILFVGDGSLQLTVQEISTLCKWDCNNTYLYVLNNDGYTIERLIHGKSASYNDIQPWNHLSLLRLFNAKKYQNVRVSTAGELDSLFSDKKFASPDRIRMIEVMLSRLDAPANLVAQAKLSERVNLEN

SEQ ID NO: 291 - DNA, 1692 bp, Kluyveromyces lactis
  CDS (1)..(1692)
atgtctgaaattacattaggtcgttacttgttcgaaagattaaagcaagtcgaagttcaaaccatctttggtctaccaggtgatttcaacttgtccctattggacaatatctacgaagtcccaggtatgagatgggctggtaatgccaacgaattgaacgctgcttacgctgctgatggttacgccagattaaagggtatgtcctgtatcatcaccaccttcggtgtcggtgaattgtctgctttgaacggtattgccggttcttacgctgaacacgttggtgtcttgcacgttgtcggtgttccatccgtctcttctcaagctaagcaattgttgttgcaccacaccttgggtaacggtgacttcactgttttccacagaatgtcctccaacatttctgaaaccactgctatgatcaccgatatcaacactgccccagctgaaatcgacagatgtatcagaaccacttacgtttcccaaagaccagtctacttgggtttgccagctaacttggtcgacttgactgtcccagcttctttgttggacactccaattgatttgagcttgaagccaaatgacccagaagccgaagaagaagtcatcgaaaacgtcttgcaactgatcaaggaagctaagaacccagttatcttggctgatgcttgttgttccagacacgatgccaaggctgagaccaagaagttgatcgacttgactcaattcccagccttcgttaccccaatgggtaagggttccattgacgaaaagcacccaagattcggtggtgtctacgtcggtaccctatcttctccagctgtcaaggaagccgttgaatctgctgacttggttctatcggtcggtgctctattgtccgatttcaacactggttctttctcttactcttacaagaccaagaacattgtcgaattccactctgactacaccaagatcagaagcgctaccttcccaggtgtccaaatgaagttcgctttacaaaaattgttgactaaggttgccgatgctgctaagggttacaagccagttccagttccatctgaaccagaacacaacgaagctgtcgctgactccactccattgaagcaagaatgggtctggactcaagtcggtgaattcttgagagaaggtgatgttgttatcactgaaaccggtacctctgccttcggtatcaaccaaactcatttcccaaacaacacatacggtatctctcaagttttatggggttccattggtttcaccactggtgctaccttgggtgctgccttcgctgccgaagaaattgatccaaagaagagagttatcttattcattggtgacggttctttgcaattgactgttcaagaaatctccaccatgatcagatggggcttgaagccatacttgttcgtattgaacaacgacggttacaccattgaaagattgattcacggtgaaaccgctcaatacaactgtatccaaaactggcaacacttggaattattgccaactttcggtgccaaggactacgaagctgtcagagtttccaccactggtgaatggaacaagttgaccactgacgaaaagttccaagacaacaccagaatcagattgatcgaagttatgttgccaactatggatgctccatctaacttggttaagcaagctcaattgactgctgctaccaacgctaagaactaa

SEQ ID NO: 292 - protein, 563 aa, Kluyveromyces lactis
MSEITLGRYLFERLKQVEVQTIFGLPGDFNLSLLDNIYEVPGMRWAGNANELNAAYAADGYARLKGMSCIITTFGVGELSALNGIAGSYAEHVGVLHVVGVPSVSSQAKQLLLHHTLGNGDFTVFHRMSSNISETTAMITDINTAPAEIDRCIRTTYVSQRPVYLGLPANLVDLTVPASLLDTPIDLSLKPNDPEAEEEVIENVLQLIKEAKNPVILADACCSRHDAKAETKKLIDLTQFPAFVTPMGKGSIDEKHPRFGGVYVGTLSSPAVKEAVESADLVLSVGALLSDFNTGSFSYSYKTKNIVEFHSDYTKIRSATFPGVQMKFALQKLLTKVADAAKGYKPVPVPSEPEHNEAVADSTPLKQEWVWTQVGEFLREGDVVITETGTSAFGINQTHFPNNTYGISQVLWGSIGFTTGATLGAAFAAEEIDPKKRVILFIGDGSLQLTVQEISTMIRWGLKPYLFVLNNDGYTIERLIHGETAQYNCIQNWQHLELLPTFGAKDYEAVRVSTTGEWNKLTTDEKFQDNTRIRLIEVMLPTMDAPSNLVKQAQLTAATNAKN

SEQ ID NO: 293 - DNA, 1716 bp, Yarrowia lipolytica
  CDS (1)..(1716)
atgagcgactccgaaccccaaatggtcgacctgggcgactatctctttgcccgattcaagcagctaggcgtggactccgtctttggagtgcccggcgacttcaacctcaccctgttggaccacgtgtacaatgtcgacatgcggtgggttgggaacacaaacgagctgaatgccggctactcggccgacggctactcccgggtcaagcggctggcatgtcttgtcaccacctttggcgtgggagagctgtctgccgtggctgctgtggcaggctcgtacgccgagcatgtgggcgtggtgcatgttgtgggcgttcccagcacctctgctgagaacaagcatctgctgctgcaccacacactcggtaacggcgacttccgggtctttgcccagatgtccaaactcatctccgagtacacccaccatattgaggaccccagcgaggctgccgacgtaatcgacaccgccatccgaatcgcctacacccaccagcggcccgtttacattgctgtgccctccaacttctccgaggtcgatattgccgaccaggctagactggatacccccctggacctttcgctgcagcccaacgaccccgagagccagtacgaggtgattgaggagatttgctcgcgtatcaaggccgccaagaagcccgtgattctcgtcgacgcctgcgcttcgcgatacagatgtgtggacgagaccaaggagctggccaagatcaccaactttgcctactttgtcactcccatgggtaagggttctgtggacgaggatactgaccggtacggaggaacatacgtcggatcgctgactgctcctgctactgccgaggtggttgagacagctgatctcatcatctccgtaggagctcttctgtcggacttcaacaccggttccttctcgtactcctactccaccaaaaacgtggtggaattgcattcggaccacgtcaaaatcaagtccgccacctacaacaacgtcggcatgaaaatgctgttcccgcccctgctcgaagccgtcaagaaactggttgccgagacccctgactttgcatccaaggctctggctgttcccgacaccactcccaagatccccgaggtacccgatgatcacattacgacccaggcatggctgtggcagcgtctcagttactttctgaggcccaccgacatcgtggtcaccgagaccggaacctcgtcctttggaatcatccagaccaagttcccccacaacgtccgaggtatctcgcaggtgctgtggggctctattggatactcggtgggagcagcctgtggagcctccattgctgcacaggagattgacccccagcagcgagtgattctgtttgtgggcgacggctctcttcagctgacggtgaccgagatctcgtgcatgatccgcaacaacgtcaagccgtacatttttgtgctcaacaacgacggctacaccatcgagaggctcattcacggcgaaaacgcctcgtacaacgatgtgcacatgtggaagtactccaagattctcgacacgttcaacgccaaggcccacgagtcgattgtggtcaacaccaagggcgagatggacgctctgttcgacaacgaagagtttgccaagcccgacaagatccggctcattgaggtcatgtgcgacaagatggacgcgcctgcctcgttgatcaagcaggctgagctctctgccaagaccaacgtttag

SEQ ID NO: 294 - protein, 571 aa, Yarrowia lipolytica
MSDSEPQMVDLGDYLFARFKQLGVDSVFGVPGDFNLTLLDHVYNVDMRWVGNTNELNAGYSADGYSRVKRLACLVTTFGVGELSAVAAVAGSYAEHVGVVHVVGVPSTSAENKHLLLHHTLGNGDFRVFAQMSKLISEYTHHIEDPSEAADVIDTAIRIAYTHQRPVYIAVPSNFSEVDIADQARLDTPLDLSLQPNDPESQYEVIEEICSRIKAAKKPVILVDACASRYRCVDETKELAKITNFAYFVTPMGKGSVDEDTDRYGGTYVGSLTAPATAEVVETADLIISVGALLSDFNTGSFSYSYSTKNVVELHSDHVKIKSATYNNVGMKMLFPPLLEAVKKLVAETPDFASKALAVPDTTPKIPEVPDDHITTQAWLWQRLSYFLRPTDIVVTETGTSSFGIIQTKFPHNVRGISQVLWGSIGYSVGAACGASIAAQEIDPQQRVILFVGDGSLQLTVTEISCMIRNNVKPYIFVLNNDGYTIERLIHGENASYNDVHMWKYSKILDTFNAKAHESIVVNTKGEMDALFDNEEFAKPDKIRLIEVMCDKMDAPASLIKQAELSAKTNV

SEQ ID NO: 295 - DNA, 1716 bp, Schizosaccharomyces pombe
  CDS (1)..(1716)
atgagtggggatattttagtcggtgaatatctattcaaaaggcttgaacaattaggggtcaagtccattcttggtgttccaggagatttcaatttagctctacttgacttaattgagaaagttggagatgagaaatttcgttgggttggcaataccaatgagttgaatggtgcttatgccgctgatggttatgctcgtgttaatggtctttcagccattgttacaacgttcggcgtgggagagctttccgctattaatggagtggcaggttcttatgcggagcatgtcccagtagttcatattgttggaatgccttccacaaaggtgcaagatactggagctttgcttcatcatactttaggagatggagactttcgcactttcatggatatgtttaagaaagtttctgcctacagtataatgatcgataacggaaacgatgcagctgaaaagatcgatgaagccttgtcgatttgttataaaaaggctaggcctgtttacattggtattccttctgatgctggctacttcaaagcatcttcatcaaatcttgggaaaagactaaagctcgaggaggatactaacgatccagcagttgagcaagaagtcatcaatcatatctcggaaatggttgtcaatgcaaagaaaccagtgattttaattgacgcttgtgctgtaagacatcgtgtcgttccagaagtacatgagctgattaaattgacccatttccctacatatgtaactcccatgggtaaatctgcaattgacgaaacttcgcaattttttgacggcgtttatgttggttcaatttcagatcctgaagttaaagacagaattgaatccactgatctgttgctatccatcggtgctctcaaatcagactttaacacgggttccttctcttaccacctcagccaaaagaatgccgttgagtttcattcagaccacatgcgcattcgatatgctctttatccaaatgtagccatgaagtatattcttcgcaaactgttgaaagtacttgatgcttctatgtgtcattccaaggctgctcctaccattggctacaacatcaagcctaagcatgcggaaggatattcttccaacgagattactcattgctggttttggcctaaatttagtgaatttttgaagccccgagatgttttgatcaccgagactggaactgcaaactttggtgtccttgattgcaggtttccaaaggatgtaacagccatttcccaggtattatggggatctattggatactccgttggtgcaatgtttggtgctgttttggccgtccacgattctaaagagcccgatcgtcgtaccattcttgtagtaggtgatggatccttacaactgacgattacagagatttcaacctgcattcgccataacctcaaaccaattattttcataattaacaacgacggttacaccattgagcgtttaattcatggtttgcatgctagctataacgaaattaacactaaatggggctaccaacagattcccaagtttttcggagctgctgaaaaccacttccgcacttactgtgttaaaactcctactgacgttgaaaagttgtttagcgacaaggagtttgcaaatgcagatgtcattcaagtagttgagcttgtaatgcctatgttggatgcacctcgtgtcctagttgagcaagccaagttgacgtctaagatcaataagcaatga

SEQ ID NO: 296 - protein, 571 aa, Schizosaccharomyces pombe
MSGDILVGEYLFKRLEQLGVKSILGVPGDFNLALLDLIEKVGDEKFRWVGNTNELNGAYAADGYARVNGLSAIVTTFGVGELSAINGVAGSYAEHVPVVHIVGMPSTKVQDTGALLHHTLGDGDFRTFMDMFKKVSAYSIMIDNGNDAAEKIDEALSICYKKARPVYIGIPSDAGYFKASSSNLGKRLKLEEDTNDPAVEQEVINHISEMVVNAKKPVILIDACAVRHRVVPEVHELIKLTHFPTYVTPMGKSAIDETSQFFDGVYVGSISDPEVKDRIESTDLLLSIGALKSDFNTGSFSYHLSQKNAVEFHSDHMRIRYALYPNVAMKYILRKLLKVLDASMCHSKAAPTIGYNIKPKHAEGYSSNEITHCWFWPKFSEFLKPRDVLITETGTANFGVLDCRFPKDVTAISQVLWGSIGYSVGAMFGAVLAVHDSKEPDRRTILVVGDGSLQLTITEISTCIRHNLKPIIFIINNDGYTIERLIHGLHASYNEINTKWGYQQIPKFFGAAENHFRTYCVKTPTDVEKLFSDKEFANADVIQVVELVMPMLDAPRVLVEQAKLTSKINKQ

SEQ ID NO: 297 - DNA, 24 bp, artificial sequence
  primer
tcatcactgataacctgattccgg

SEQ ID NO: 298 - DNA, 26 bp, artificial sequence
  primer
cgagtctgttttggcagtcaccttaa

SEQ ID NO: 299 - DNA, 23 bp, artificial sequence
  primer
gagcgtgacgacgtcaacttcct

SEQ ID NO: 300 - DNA, 23 bp, artificial sequence
  primer
cagttcaatgctgaaccacacag

SEQ ID NO: 301 - DNA, 23 bp, artificial sequence
  primer
gaaggttgcgcctacactaagca

SEQ ID NO: 302 - DNA, 23 bp, artificial sequence
  primer
gggagcggcaagattaaaccagt

SEQ ID NO: 303 - DNA, 23 bp, artificial sequence
  primer
tggatcacgtaatcagtacccag

SEQ ID NO: 304 - DNA, 23 bp, artificial sequence
  primer
atccttaactgatcggcattgcc

SEQ ID NO: 305 - DNA, 24 bp, Artificial sequence
  Primer
cacccgtaatataaagccgtaagc

SEQ ID NO: 306 - DNA, 22 bp, Artificial sequence
  Primer
tcgatggtcaacgcaacgaaaa

SEQ ID NO: 307 - DNA, 26 bp, Artificial sequence
  Primer
atcagtataaaagagagccagacccg

SEQ ID NO: 308 - DNA, 24 bp, Artificial sequence
  Primer
ggcatttttgcttctgtcatcggt

SEQ ID NO: 309 - DNA, 23 bp, Artificial sequence
  Primer
gcggtcccggaaactttcttaag

SEQ ID NO: 310 - DNA, 23 bp, Artificial sequence
  Primer
gttgccgacaggttggtgatgat

SEQ ID NO: 311 - DNA, 72 bp, Artificial sequence
  Primer
atgtctaagatttttgatttcgtaaaacctggcgtaatcactggtgatgagcccacgtggccactagtactt

SEQ ID NO: 312 - DNA, 70 bp, Artificial sequence
  Primer
gaatatcttacagaacgtcgatcgcgttcagttcctggaatgctttctccgcggccgcataacttcgtat

SEQ ID NO: 313 - DNA, 23 bp, Artificial sequence
  Primer
cgcagcacatgcaacttgaagta

SEQ ID NO: 314 - DNA, 23 bp, Artificial sequence
  Primer
cgggccttgagataagcagaaag

SEQ ID NO: 315 - DNA, 24 bp, Artificial sequence
  Primer
tacctttgcggtgaaaacttgacc

SEQ ID NO: 316 - DNA, 22 bp, Artificial sequence
  Primer
agcgtcgcatcaggcataggtt

SEQ ID NO: 317 - DNA, 39 bp, Artificial sequence
  Primer
cataagctttaaggaggagcctttatgaatccacaattg

SEQ ID NO: 318 - DNA, 31 bp, Artificial sequence
  Primer
cattctagaacttttacagcttagcgccttc

SEQ ID NO: 319 - DNA, 20 bp, Artificial sequence
  Primer
cacgtctctacccgaacggt

SEQ ID NO: 320 - DNA, 20 bp, Artificial sequence
  Primer
gtgcacagttcgcaattagc

SEQ ID NO: 321 - DNA, 20 bp, Artificial sequence
  Primer
catcggtccagacggcacaa

SEQ ID NO: 322 - DNA, 20 bp, Artificial sequence
  Primer
aggcctgctttgagcagttc

SEQ ID NO: 323 - DNA, 4964 bp, Saccharomyces cerevisiae
acctcatctataatttttaccctgatctaactaactttggcatgcctggttcaatctacgggttacagtcatcgttgaaaacgatggaaaaacatgtcgagattcctcaatccatacaccattatagtccgttttatcagcttccactaattttttaaatctcagtttcttcttgaaatttagcatcgtgcatgggatagcggctagtaaaaaagaaaattaatatctcattaacaaagttattgtacataatccggtacaatattcttcaatgtactctctaatatcgagcacactggcaatattcatgcacacattcgcctaatgctgacgaatgcttaatcagtgcaattactgccaccctcttgatatgtgggctaaatcctttaggacctgtaaaaaatgcaatcacgttttcacatttttttttttcttgcggaattgcggaatttcccagttggcagcgttatccgatttgagatcgacttgcatcaacctttgaaaaatataaggatgagaaagtgaaatcggttttttttttccattgtcgtcatcaacatgattttttaaataaataaatacgattttttattttttttcccttctttgtttttgttttgcttattcccatcttcattattaaattcttccgctcttaataaaggagtttttttattatcttcttgtgtaatcatcctttttctttaattttcttccttttctttttctctttactggtttttttacttctttattctcaaccatctaaagaatattattgctttctaccaataaaatctgttaattctatttggattgtcgtctactcaagtctcgcctagtaaataaacgataaacaaatttgaagtaagaataacaatatagggagagaaatttttctatttttaatttcgaaacaggtaccaaaaaatctaagttcactttagcactatttgggaaagcttttatataaaaaatctgaaacaaaatcatatcaaagatgcaatctcaagattcatgctacggtgttgcattcagatctatcatcacaaatgatgaagctttattcaagaagaccattcacttttatcacactctaggatttgcaactgtgaaagatttcaacaaattcaaacatggtgaaaatagcttactatcttcagggacttcccaagattccttgagagaagtttggttagaatctttcaagttgagtgaggttgatgcttctgggttccgtataccacaacaagaagctactaacaaggctcaaagtcaaggtgctctattaaagattcgtttagtgatgtctgctccaatcgatgaaactttcgacaccaacgaaaccgccacaatcacttatttctctactgatttgaacaagattgtcgagaaattcccaaaacaagccgaaaaattgtccgataccttagtgtttttgaaagatccaatgggcaacaacatcaccttctcaggcttagctaatgcaaccgattccgctccaacttccaaagatgctttcttagaagctacctccgaagacgaaatcatctctagagcttcttccgatgcttctgacttactaagacaaacattgggctcttctcaaaagaagaagaagattgctgtcatgacttctggtggtgattctccaggtatgaatgccgctgttcgtgccgttgttcgtacaggtatacatttcggctgtgatgtttttgctgtttacgaaggttacgaaggtttactaagaggcggtaaatatttaaagaaaatggcttgggaagatgtcagaggttggttaagtgaaggtggtactttgattggtactgctcgttctatggaattcagaaagcgtgagggtcgtagacaagctgcaggcaatttaatttcgcaaggtattgacgctttggttgtttgtggtggtgatggttctttaaccggtgctgatcttttcagacacgaatggccatctttggttgatgaattggttgcagaaggtagattcactaaagaagaagtcgccccatacaagaatttgtccattgttggtcttgtcggttccatcgataatgatatgtctggtactgactctaccattggtgcttattctgctttggaaagaatctgtgaaatggttgactacattgatgccaccgctaaatcccactcccgtgcctttgttgttgaagttatgggtagacattgtggttggttggccttgatggctggtattgctaccggtgccgattacatttttattccagaaagagctgttcctcacggaaaatggcaggacgaattgaaggaagtgtgccaaagacacagaagtaagggtagaagaaataacacaattattgtcgctgaaggtgctttagatgatcaattaaaccctgttactgccaatgacgtcaaagatgctttgattgaattgggtctagacaccaaggtaaccattctaggtcacgttcaaagaggtggtacagctgttgctcatgacagatggttagctactctacaaggtgtcgatgctgttaaggccgttctggaatttacccctgaaactccttctccattaattggtattttagaaaacaagataattagaatgccattggttgaatctgtgaagttgactaaatctgttgccactgccattgaaaacaaagatttcgataaggcaatttctttaagagacacagaatttattgaactttacgaaaacttcttatccactaccgttaaagatgatggttccgaattattgccagtatctgacagactaaacattggtattgtccatgttggtgccccatctgctgctttgaacgctgccacccgtgccgcaactctatactgtttgtctcacggccataaaccatacgctatcatgaatggtttcagtggattgattcaaaccggtgaagtgaaggaactatcatggattgatgtcgaaaactggcataacttgggtggttccgaaatcggtacgaacagatctgttgcttcagaagatttgggtaccattgcttactacttccaaaagaacaagctagacggtttgattattcttggtggttttgaaggtttcaggtccttgaagcaattgcgtgacggtagaacccaacacccaatctttaacattccaatgtgtttgattccagccactgtttctaacaacgttccaggtactgaatactcacttggtgttgatacctgtttgaacgcattagtcaattacactgatgacatcaaacagagtgcttctgcgacaagaagaagagtcttcgtctgtgaagtccaaggtggtcactctggttacatcgcttctttcactggtttaatcactggtgctgtttcagtgtacactccagaaaagaagatcgacttagcttctatcagagaagatataactctattaaaagagaactttcgtcacgacaaaggtgaaaacagaaacggtaagctattggttagaaacgaacaagcttctagcgtatatagcactcaattgttggctgacatcatctctgaagcaagcaagggtaagtttggtgttagaactgctatcccaggccatgttcaacaaggtggtgttccatcttctaaagaccgtgtcaccgcttccagatttgctgtcaaatgtatcaagtttatcgaacaatggaacaagaaaaatgaagcttctccaaacactgacgctaaggttttgagattcaagttcgatactcacggtgaaaaggtaccaactgttgagcacgaagatgactctgctgctgttatctgtgttaatggttctcacgtttccttcaagccaattgctaacctttgggaaaacgaaaccaacgttgaattaagaaagggttttgaagttcactgggctgaatacaacaagattggtgacatcctgtccggtagattaaagttgagagctgaggtagccgctttagccgctgaaaacaaatgaatgattgcaatgaaaagtttaagttaagcaaaaggaggtaaaaatggcatgcactttaatttttatacaatcgtttttttgtcataagacttatttatgtatctgttgtttttctttttctatcctctatttttgtctatttgtctttgttttactctttttcattattatttctttatataatttttgtacgatatgatacacataacaatgagcaatgaacatatttctaatcctaaccattagatatacttttcaactgaggaataatggcgccttgattaaactaagctatggaatttgcattattcaagttttagggtgtgcttaatctgcgttgacaatggttcacgaagacgacatcggcaactttgctgtactacaaattgctctgaatgtgaggctgatccacatcatagtgaggcgcgctaccttaattgtagtcgtattgtcatcggtctacgaataccgtttggtttatttgtcggccttttttctttccgtttctttttatctttccgctggaaaaatggaaactagtgccgataatcggagatgggatgactaaatatttctttaaggcattggcaatgttcaaacctctgatagaacggcagatatatatttaagagaatatagtcaaggttgacgccgcatactttggttttgtttcaaaaagaaacaggtgaaaaattataaagaccaaactagaataccatgcccagtgtctgccatacaagcccgatagaaaagattatccaacaagggcatcgcatacagaatgattccttaataccgtcaaaacgcaccaagctggcccatacggaattaacagcacactatgccactgaagactcgcatgtggaaaaacactttttgcataatggtagtaattttgacggcattgacaatgtaaggtatcaaaatcaaccctctccattaaccttcattactccaaacaacactgtagattccagtgattgggttccgcagttctcgt

SEQ ID NO: 324 - DNA, 4880 bp, Saccharomyces cerevisiae
gcaatcaacgtgagccttaaccaatgaggaagtaagaaggaaataagaagtaagacataaaataaaactacaaaaaagaaagaagatccgcaaaaacccaagaacagcattgtaagtactaccatctatatagatcgaatatcctactaatatatagtaactgccacacgaaaaactgtgggtgtaaagactattcatagccattctctgctgctttgttgcatcgtatcatcgcccgtttcagccagtcccgcataccccctttgcaacgttaacgttaccgctagcgtttaccatctccacgctaaaaggaaaacgaagattaagataaagttgggtaaaatccggggtaagaggcaagggggtagagaaaaaaaaaccggagtcattatatacgataccgtccagggtaagacagtgatttctagcttccacttttttcaatttctttttttcgttccaaatggcgtccacccgtacatccggaatctgacggcacaagagccgattagtggaagccacggttacgtgattgcggtttttttttcctacgtataacgctatgacggtagttgaatgttaaaaacgaaaacagagatattgaattgatcaatttgatcagtacgtatgtaatcttttgtttgccatgttaaatcggcctttttttccatccggtctttatctaccattcatttattacatcgcaatgaagtctctcgcttcatgttgttgttttttttcctgccttttttttatccgctctcattcttatttttcctacttgcattttataaaacaataatatttttttcttctttttgtcctttatttattacttccttgattaaaagcttcttatcttcggtttcataaagaagaaaattcctttttttttttttttttccttcttcttgcttaaaagcctttcttatacctcatttgaacaatagaactagatttagagactagtttagcattggccaagaactaaccatacgcaatgactgttactactccttttgtgaatggtacttcttattgtaccgtcactgcatattccgttcaatcttataaagctgccatagatttttacaccaagtttttgtcattagaaaaccgctcttctccagatgaaaactccactttattgtctaacgattccatctctttgaagatccttctacgtcctgatgaaaaaatcaataaaaatgttgaggctcatttgaaggaattgaacagtattaccaagactcaagactggagatcacatgccacccaatccttggtatttaacacttccgacatcttggcagtcaaggacactctaaatgctatgaacgctcctcttcaaggctacccaacagaactatttccaatgcagttgtacactttggacccattaggtaacgttgttggtgttacttctactaagaacgcagtttcaaccaagccaactccaccaccagcaccagaagcttctgctgagtctggtctttcctctaaagttcactcttacactgatttggcttaccgtatgaaaaccaccgacacctatccatctctgccaaagccattgaacaggcctcaaaaggcaattgccgtcatgacttccggtggtgatgctccaggtatgaactctaacgttagagccatcgtgcgttccgctatcttcaaaggttgtcgtgcctttgttgtcatggaaggttatgaaggtttggttcgtggtggtccagaatacatcaaggaattccactgggaagacgtccgtggttggtctgctgaaggtggtaccaacattggtactgcccgttgtatggaattcaagaagcgcgaaggtagattattgggtgcccaacatttgattgaggccggtgtcgatgctttgatcgtttgtggtggtgacggttctttgactggtgctgatctgtttagatcagaatggccttctttgatcgaggaattgttgaaaacaaacagaatttccaacgaacaatacgaaagaatgaagcatttgaatatttgcggtactgtcggttctattgataacgatatgtccaccacggatgctactattggtgcttactctgccttggacagaatctgtaaggccatcgattacgttgaagccactgccaactctcactcaagagctttcgttgttgaagttatgggtagaaactgtggttggttagctttattagctggtatcgccacttccgctgactatatctttattccagagaagccagccacttccagcgaatggcaagatcaaatgtgtgacattgtctccaagcacagatcaaggggtaagagaaccaccattgttgttgttgcagaaggtgctatcgctgctgacttgaccccaatttctccaagcgacgtccacaaagttctagttgacagattaggtttggatacaagaattactaccttaggtcacgttcaaagaggtggtactgctgttgcttacgaccgtatcttggctactttacaaggtcttgaggccgttaatgccgttttggaatccactccagacaccccatcaccattgattgctgttaacgaaaacaaaattgttcgtaaaccattaatggaatccgtcaagttgaccaaagcagttgcagaagccattcaagctaaggatttcaagagagctatgtctttaagagacactgagttcattgaacatttaaacaatttcatggctatcaactctgctgaccacaacgaaccaaagctaccaaaggacaagagactgaagattgccattgttaatgtcggtgctccagctggtggtatcaactctgccgtctactcgatggctacttactgtatgtcccaaggtcacagaccatacgctatctacaatggttggtctggtttggcaagacatgaaagtgttcgttctttgaactggaaggatatgttgggttggcaatcccgtggtggttctgaaatcggtactaacagagtcactccagaagaagcagatctaggtatgattgcttactatttccaaaagtacgaatttgatggtttgatcatcgttggtggtttcgaagcttttgaatctttacatcaattagagagagcaagagaaagttatccagctttcagaatcccaatggtcttgataccagctactttgtctaacaatgttccaggtactgaatactctttgggttctgataccgctttgaatgctctaatggaatactgtgatgttgttaaacaatccgcttcttcaaccagaggtagagccttcgttgtcgattgtcaaggtggtaactcaggctatttggccacttacgcttctttggctgttggtgctcaagtctcttatgtcccagaagaaggtatttctttggagcaattgtccgaggatattgaatacttagctcaatcttttgaaaaggcagaaggtagaggtagatttggtaaattgattttgaagagtacaaacgcttctaaggctttatcagccactaaattggctgaagttattactgctgaagccgatggcagatttgacgctaagccagcttatccaggtcatgtacaacaaggtggtttgccatctccaattgatagaacaagagccactagaatggccattaaagctgtcggcttcatcaaagacaaccaagctgccattgctgaagctcgtgctgccgaagaaaacttcaacgctgatgacaagaccatttctgacactgctgctgtcgttggtgttaagggttcacatgtcgtttacaactccattagacaattgtatgactatgaaactgaagtttccatgagaatgccaaaggtcattcactggcaagctaccagactcattgctgaccatttggttggaagaaagagagttgattaaaagaaaatgaccttttattacactttctattattaatgtcaattaatgttaacccatgtttttcttttgtgtctataattctttttttttatctctaagcttttgaacaatgaattttttgttcctttcttttaataatacaagtactaccccatgaaaccaatattatcatgcatttttatgaatgtcaagaataaagatactgttattttttgtgtcttattttttttctctttgtttatttaaacgttttctaaaattaaaacttatgtatactggaatatgtgatatagacgatttaaaagataattccaataaacgtccctcggatctcatatttataaaggtacccttttaatacaatatttatacatgtgcgttaaatactttgttctcttattatctatgaacttatcacgaagaacggagatgtaaacaaaaagagtgaatgaactatgaactttaaattaccttattacggaggaagtattccttcacctatgaaggatacaaggtctacatttttcgtctgataactctcaggaaattaaacaaagtggtatggttttatcaaggggagaaacaaagaaaaatagcgtgagattaacggcaaaacaagaaaagaaacctcaatctacgtttcaaactttaaaacagtcacttaaacttagcaacaataaaaagttgaaacaggattcgacccaacactcaaacgatacaaataaatctgttaaagccaaaaaaaatggcacgtcctcgaagaaaaccggaacacaaaggaaaagaatatcaactcagagattttcattgtttacctatggcaatgttcaggttatgaattcattcgttcccattcataatgatattccgaatagcagttgcattcgtagaaattcccaagtatccgcaaataatgtcactgaaagtagtggagtattcttcaatgatacgcaaagtcaagacagtcaaaacactattaagttaaaacctacatctttaa

SEQ ID NO: 325 - DNA, 3080 bp, Saccharomyces cerevisiae
actggtagagagcgactttgtatgccccaattgcgaaacccgcgatatccttctcgattctttagtacccgaccaggacaaggaaaaggaggtcgaaacgtttttgaagaaacaagaggaactacacggaagctctaaagatggcaaccagccagaaactaagaaaatgaagttgatggatccaactggcaccgctggcttgaacaacaataccagccttccaacttctgtaaataacggcggtacgccagtgccaccagtaccgttacctttcggtatacctcctttccccatgtttccaatgcccttcatgcctccaacggctactatcacaaatcctcatcaagctgacgcaagccctaagaaatgaataacaatactgacagtactaaataattgcctacttggcttcacatacgttgcatacgtcgatatagataataatgataatgacagcaggattatcgtaatacgtaatagttgaaaatctcaaaaatgtgtgggtcattacgtaaataatgataggaatgggattcttctatttttcctttttccattctagcagccgtcgggaaaacgtggcatcctctctttcgggctcaattggagtcacgctgccgtgagcatcctctctttccatatctaacaactgagcacgtaaccaatggaaaagcatgagcttagcgttgctccaaaaaagtattggatggttaataccatttgtctgttctcttctgactttgactcctcaaaaaaaaaaaatctacaatcaacagatcgcttcaattacgccctcacaaaaacttttttccttcttcttcgcccacgttaaattttatccctcatgttgtctaacggatttctgcacttgatttattataaaaagacaaagacataatacttctctatcaatttcagttattgttcttccttgcgttattcttctgttcttctttttcttttgtcatatataaccataaccaagtaatacatattcaaaatgggtgttgaacaaatcttaaagagaaagaccggtgtcatcgttggtgaagatgtccacaacttattcacttacgctaaggaacacaagttcgctattccagctattaacgtcacctcttcttctactgccgtcgctgctttagaagctgctagagacagcaagtccccaatcattttgcaaacctctaacggtggtgctgcttacttcgctggtaagggtatctctaacgaaggtcaaaatgcttccatcaagggtgctattgccgctgcccactacatcagatccattgctccagcttacggtatcccagttgtcttacactctgaccactgtgccaagaagttgttgccatggttcgatggtatgttggaagctgatgaagcttacttcaaggaacacggtgaaccattattctcctcccacatgttggatttgtctgaagaaaccgatgaagaaaacatctctacttgtgtcaagtacttcaagagaatggccgctatggaccaatggttagaaatggaaatcggtattaccggtggtgaagaagatggtgttaacaacgaaaacgctgacaaggaagacttgtacaccaagccagaacaagtttacaacgtctacaaggctttgcacccaatctctccaaacttctccattgctgctgctttcggtaactgtcacggtttgtacgctggtgacatcgctttgagaccagaaatcttggctgaacaccaaaagtacaccagagaacaagttggttgcaaggaagaaaagccattgttcttggtcttccacggtggttccggttctactgtccaagaattccacactggtattgacaacggtgttgtcaaggtcaacttggacactgactgtcaatacgcttacttgactggtatcagagactacgtcttgaacaagaaggactacataatgtccccagtcggtaacccagaaggtccagaaaagccaaacaagaagttcttcgacccaagagtctgggttagagaaggtgaaaagaccatgggtgctaagatcaccaagtctttggaaactttccgtaccactaacactttataagttaattcaaattaattgatatagttttttaatgagtattgaatctgtttagaaataatggaatattatttttatttatttatttatattattggtcggctcttttcttctgaaggtcaatgacaaaatgatatgaaggaaataatgatttctaaaattttacaacgtaagatatttttacaaaagcctagctcatcttttgtcatgcactattttactcacgcttgaaattaacggccagtccactgcggagtcatttcaaagtcatcctaatcgatctatcgtttttgatagctcattttggagttcgcgattgtcttctgttattcacaactgttttaatttttatttcattctggaactcttcgagttctttgtaaagtctttcatagtagcttactttatcctccaacatatttaacttcatgtcaatttcggctcttaaattttccacatcatcaagttcaacatcatcttttaacttgaatttattctctagctcttccaaccaagcctcattgctccttgatttactggtgaaaagtgatacactttgcgcgcaatccaggtcaaaactttcctgcaaagaattcaccaatttctcgacatcatagtacaatttgttttgttctcccatcacaatttaatatacctgatggattcttatgaagcgctgggtaatggacgtgtcactctacttcgcctttttccctactccttttagtacggaagacaatgctaataaataagagggtaataataatattattaatcggcaaaaaagattaaacgccaagcgtttaattatcagaaagcaaacgtcgtaccaatccttgaatgcttcccaattgtatattaagagtcatcacagcaacatattcttgttattaaattaattattattgatttttgatattgtataaaaaaaccaaatatgtataaaaaaagtgaataaaaaataccaagtatggagaaatatattagaagtctatacgttaaa

SEQ ID NO: 326 - DNA, 3470 bp, Saccharomyces cerevisiae
gctatgtcactaatgatctcgtcggactgataaaattatggctgttagagctacccgacagcctaataccttcaaaccactacgatgacttaattaaggccgaaaaatcgctaacatccctatgtgaacagtttccgacgagctccttaaggtttctacaagaactagcaaaccattttcaattgatcaatagcaaatactcacttccgccgcaaacaatacaagatttgtttagagacaacagtgacatagacataccattggcccatcacttcgtaagaagaacaggcttacagaaccctatcgacatcaaaatcttgtcaccaacattatctacatttttcatcaacgaaagaactgtagaaactttgcaaacgttgatcgcaaacaggatcacgacggcaactactgcgacactcactgaaccgccgacgataattataaaggatacaacggcacctatacactctacccctaagccaccgccaaacgacaaggatggccatttcatacctcggccattcaagactagttctactccgacaaccccagagagacctaaacgtaagagtggtttattccttcccatcaacgtcaacgatgtcccttctacataactccatgcatgctacatagtaactacgtaaatcacctgctacctctctgttctttcgtcccgcctcgaggttgtgctgcttttgtacctattgtggctgtcggtgttacattacggtgcctcggtgttacgcggtgcttcgtcctggtggtccacgcggccttgcgctttggccttggtgggcttcgaggctgtattatataaatgggcctgatgttcgttaaaagctgcagtattgttcctgagcttgtttctttttcaaaggtttccttttttcttagtggggtcctttcttacataataaagtaaatagcctgatacatataaacctgtattgttgccattacagaaaaaagccactttctatacaaaaactacaataaaatgtctgctgatttcggtttgattggtttggccgtcatgggtcaaaatttgatcttgaacgctgctgaccacggtttcactgtttgtgcttacaacagaactcaatccaaggtcgaccatttcttggccaatgaagctaagggcaaatctatcatcggtgctacttccattgaagatttcatctccaaattgaagagacctagaaaggtcatgcttttggttaaagctggtgctccagttgacgctttgatcaaccaaatcgtcccacttttggaaaagggtgatattatcatcgatggtggtaactctcacttcccagattctaatagacgttacgaagaattgaagaagaagggtattcttttcgttggttctggtgtctccggtggtgaggaaggtgcccgttacggtccatctttgatgccaggtggttctgaagaagcttggccacatattaagaacatcttccaatccatctctgctaaatccgacggtgaaccatgttgcgaatgggttggcccagccggtgctggtcactacgtcaagatggttcacaacggtattgaatacggtgatatgcaattgatttgtgaagcttatgacatcatgaagagattgggtgggtttaccgataaggaaatcagtgacgtttttgccaaatggaacaatggtgtcttggattccttcttggtcgaaattaccagagatattttgaaattcgacgacgtcgacggtaagccattagttgaaaaaatcatggatactgctggtcaaaagggtactggtaagtggactgccatcaacgccttggatttgggtatgccagttactttgattggtgaagctgtctttgcccgttgtctatctgctttgaagaacgagagaattagagcctccaaggtcttaccaggcccagaagttccaaaagacgccgtcaaggacagagaacaatttgtcgatgatttggaacaagctttgtatgcttccaagattatttcttacgctcaaggtttcatgttgatccgtgaagctgctgctacttatggctggaaactaaacaaccctgccatcgctttgatgtggagaggtggttgtatcattagatctgttttcttgggtcaaatcacaaaggcctacagagaagaaccagatttggaaaacttgttgttcaacaagttcttcgctgatgccgtcaccaaggctcaatctggttggagaaagtcaattgcgttggctaccacctacggtatcccaacaccagccttttccaccgctttgtctttctacgatgggtacagatctgaaagattgccagccaacttactacaagctcaacgtgactactttggtgctcacactttcagagtgttgccagaatgtgcttctgacaacttgccagtagacaaggatatccatatcaactggactggccacggtggtaatgtttcttcctctacataccaagcttaaaggaaatctccaacctggacataaaccaaaaaaatttaatgaaatagattagttatagtaaaagtaatcataataataaatagataaataaatccaaatgcaattataaatagtatatgaagttatgtgttttctaaaatattaaaggtttataaacggggtcccgaaactatctccatttctttttttttttttacgtaaggaaaggcaaacaggcgacacaaaatcatgaagtcagaaaataaaataaaagtgaaaaatttcacaatagtgcctattatcatgatagaagtagagtagaaaagctagcaacaatgagaagctctggcacatatgagaatgatccttctggggaaataacctcaacttccccaaagcagtcgaagcagaaaaagcctaccaaatttagggaaagaatgcgcaggtggttacaaaatgggaaaaataacaaccaccaaggagaggaggatgttcctgaaatatttaacaagaatttttatccgcaaacaggcatgacagctttcaacaataatgataatggtgaggttcaggatgttacaaacaatttttttttgcccagtgaagatgaatctggtccagttcaaagtagtgttaaaacttttttaactggtaacaatgatgaagattctaacttccaacaaaaccagaatcctaaacaaaagtccgaacttccaaagtcaccttaccggcaaaaacctacgcaagaaatagcattattgaaagatcttttcgttaccaacaaatatgacgatccctatttgaattcttccacaaggtttggtaacataacttcaacttttcccagtagtttgtcattgaggactgtcaccttacaaacaataaaaaaaagaattgactgtatttctgcaaaaaaaaaagaagtgtggaagacagaggaaaaatttctaaaagatatcttaatgtggttacagagttcaaattttgaagaccctgatacaatatcattaatacatgaaat

SEQ ID NO: 327 - DNA, 3479 bp, Saccharomyces cerevisiae
ccgtcataactttgaatcctgtcatgcatcaaagttgccccagcgttattctcaagaaaatgaatagatctaggcgtaacactgacaatcctgttcgtaaaataatctgggggtgaattataaaagtccgataatttatcttttaagtccaccatatcgactaaagttgtctttagatcttttaattgcggagaattcttaatcgatgcagctaaagtcaaacctgcaggacccccacctacgattaatacatctgttaactttggagctgaagatttggctgttgccaaacccctcaccaaaatacgccgagtaagcataacttttgaaaagaacatgcctctgtgtcaatcgatacaaggttcactgaaagaccaatttgagttactgaatgaagaaaattatccgccacaattatatttattcctttttaatgtcgtatcacaattccagaagggatatttctcagaaacagtttaagatctgcgtgttccttctgcaagaagaagggaaaaaaagaaaggagaaacaatagcagcataaatcttgttcgataaaacaacatcactttttcttgaaacttcaagggtttgcctccttagcttagtggtagagcgttgcacttgtaatgcaaaggtcgttagttcaattctgacaggtggcagtttcctttttatttgtcagtattaataattgaggcgcccctaattttttttggcaccgctctcgatgaaaaagtagagacgtcagaaattgaacgtttcctctaggagtttattaactaataaccccgaaaaatggctctttaaccacgagtgcccacggaggttatcttcacccctattttcattttaaattttagatcactgctaggagttagctcaaatatatatatatatatatatatggagacaacgttgaagaattcgtaggtgcaggtgagcatattgccggataagtgtagttacgcaactacaattaaaaaaacacgaggaacagaatgtcaaaggcagtaggtgatttaggcttagttggtttagccgtgatgggtcaaaatttgatcttaaacgcagcggatcacggatttaccgtggttgcttataataggacgcaatcaaaggtagataggtttctagctaatgaggcaaaaggaaaatcaataattggtgcaacttcaattgaggacttggttgcgaaactaaagaaacctagaaagattatgcttttaatcaaagccggtgctccggtcgacactttaataaaggaacttgtaccacatcttgataaaggcgacattattatcgacggtggtaactcacatttcccggacactaacagacgctacgaagagctaacaaagcaaggaattctttttgtgggctctggtgtctcaggcggtgaagatggtgcacgttttggtccatctttaatgcctggtgggtcagcagaagcatggccgcacatcaagaacatctttcaatctattgccgccaaatcaaacggtgagccatgctgcgaatgggtggggcctgccggttctggtcactatgtgaagatggtacacaacggtatcgagtacggtgatatgcagttgatttgcgaggcttacgatatcatgaaacgaattggccggtttacggataaagagatcagtgaagtatttgacaagtggaacactggagttttggattctttcttgattgaaatcacgagggacattttaaaattcgatgacgtcgacggtaagccattggtggaaaaaattatggatactgccggtcaaaagggtactggtaaatggactgcaatcaacgccttggatttaggaatgccagtcactttaattggggaggctgttttcgctcgttgtttgtcagccataaaggacgaacgtaaaagagcttcgaaacttctggcaggaccaacagtaccaaaggatgcaatacatgatagagaacaatttgtgtatgatttggaacaagcattatacgcttcaaagattatttcatatgctcaaggtttcatgctgatccgcgaagctgccagatcatacggctggaaattaaacaacccagctattgctctaatgtggagaggtggctgtataatcagatctgtgttcttagctgagattacgaaggcttatagggacgatccagatttggaaaatttattattcaacgagttcttcgcttctgcagttactaaggcccaatccggttggagaagaactattgcccttgctgctacttacggtattccaactccagctttctctactgctttagcgttttacgacggctatagatctgagaggctaccagcaaacttgttacaagcgcaacgtgattattttggcgctcatacatttagaattttacctgaatgtgcttctgcccatttgccagtagacaaggatattcatatcaattggactgggcacggaggtaatatatcttcctcaacctaccaagcttaaggagttaaaggcaaagttttcttttctagagccgttcccacaaataattatacgtatatgcttcttttcgtttactatatatctatatttacaagcctttattcactgatgcaatttgtttccaaatacttttttggagatctcataactagatatcatgatggcgcaacttgggcgtatcttaattactctggctgccaggcccgtgtagagggccgcaagaccttctgtacgccatatagtctctaagaacttgaacatgtttctagacctattgccgcctttcggatcgctattgttcatcatggatatttgccatctcgtcttaccgacatcaaaagggtgtgtgcatatagcagctatcatcccacttatgcaaccactggcaaaactgtttataaaatggacccagtttgcgtccttagatgcaaatcgagtagaatctagccatagtctttccttgcaaagttcataggaactccaatatattgcactaaacggaacgtctctccacagagtgatctccaaacctttgaagagggcccgagaaggacccaccattttcatttcctgcctcgtttcgtttaataaatctttaaccatcatccatgtctttgtggactttgatgatctcggtatactttgcagtttagttttaaccaattctaaaggtgcaatacttgttgctgcaaataccctcgcaattgcaccacaaaagagggggtttaatgttgggtacgtcgaggctataggagaaacgtctcttatatattcataaccactaaaataaaccatgttggcaggaatagccattaatagggtcaaagaaatacccctccacaaacttgtaataccttcgacgctggcaattttcgtgaatgcttctaaagtaccgttgaacttcaacgatgaatttttacagtgcagttcttgaaaacaagcactctcccaaaatatttttgcgttgttcaagttctgtcctccgacgttggtgaatgtc

SEQ ID NO: 328 - DNA, 3665 bp, Saccharomyces cerevisiae
aattcagttttctgactgagttaaaaactaatgtagcgacaccacttccattggtgcctccgttattttttttttgtatgttaatgctaaataatacaccgctatgtatttcagggcactacttctacacatcaacggtactaaacatttcgctcaagatcggtccgctttcacgtatttggatgctatgcaatgttgactattcttagtggataacatgcggcatttcctggcggctatttgcatcgctatgtaagtggcaatgttcggatgtgggtagtactttcaaaagaaaaaatattactgaagaaggcatactacgccaagactattttattctcagcacttgtcctacgtggggttagaggcgagtaagactttggccccgctgcggaagcaaagagaattttgccatcggacatgctaccttacgcttatatctctcattggaatatcgttttctgattaaaacacggaagtaagaacttaattcgtttttcgttgaactatgttgtgccagcgtaacattaaaaaagagtgtacaaggccacgttctgtcaccgtcagaaaaatatgtcaatgaggcaagaaccgggatggtaacaaaaatcacgatctgggtgggtgtgggtgtattggattataggaagccacgcgctcaacctggaattacaggaagctggtaattttttgggtttgcaatcatcaccatctgcacgttgttataatgtcccgtgtctatatatatccattgacggtattctatttttttgctattgaaatgagcgttttttgttactacaattggttttacagacggaattttccctatttgtttcgtcccatttttccttttctcattgttctcatatcttaaaaaggtcctttcttcataatcaatgctttcttttacttaatattttacttgcattcagtgaattttaatacatattcctctagtcttgcaaaatcgatttagaatcaagataccagcctaaaaatgtccaataactcattcactaacttcaaactggccactgaattgccagcctggtctaagttgcaaaaaatttatgaatctcaaggtaagactttgtctgtcaagcaagaattccaaaaagatgccaagcgttttgaaaaattgaacaagactttcaccaactatgatggttccaaaatcttgttcgactactcaaagaacttggtcaacgatgaaatcattgctgcattgattgaactggccaaggaggctaacgtcaccggtttgagagatgctatgttcaaaggtgaacacatcaactccactgaagatcgtgctgtctaccacgtcgcattgagaaacagagctaacaagccaatgtacgttgatggtgtcaacgttgctccagaagtcgactctgtcttgaagcacatgaaggagttctctgaacaagttcgttctggtgaatggaagggttataccggtaagaagatcaccgatgttgttaacatcggtattggtggttccgatttgggtccagtcatggtcactgaggctttgaagcactacgctggtgtcttggatgtccacttcgtttccaacattgacggtactcacattgctgaaaccttgaaggttgttgacccagaaactactttgtttttgattgcttccaagactttcactaccgctgaaactatcactaacgctaacactgccaagaactggttcttgtcgaagacaggtaatgatccatctcacattgctaagcatttcgctgctttgtccactaacgaaaccgaagttgccaagttcggtattgacaccaaaaacatgtttggtttcgaaagttgggtcggtggtcgttactctgtctggtcggctattggtttgtctgttgccttgtacattggctatgacaactttgaggctttcttgaagggtgctgaagccgtcgacaaccacttcacccaaaccccattggaagacaacattccattgttgggtggtttgttgtctgtctggtacaacaacttctttggtgctcaaacccatttggttgctccattcgaccaatacttgcacagattcccagcctacttgcaacaattgtcaatggaatctaacggtaagtctgttaccagaggtaacgtgtttactgactactctactggttctatcttgtttggtgaaccagctaccaacgctcaacactctttcttccaattggttcaccaaggtaccaagttgattccatctgatttcatcttagctgctcaatctcataacccaattgagaacaaattacatcaaaagatgttggcttcaaacttctttgctcaagctgaagctttaatggttggtaaggatgaagaacaagttaaggctgaaggtgccactggtggtttggtcccacacaaggtcttctcaggtaacagaccaactacctctatcttggctcaaaagattactccagctactttgggtgctttgattgcctactacgaacatgttactttcactgaaggtgccatttggaatatcaactctttcgaccaatggggtgttgaattgggtaaagtcttggctaaagtcatcggcaaggaattggacaactcctccaccatttctacccacgatgcttctaccaacggtttaatcaatcaattcaaggaatggatgtgaacaaatcgctcttaaatatatacctaaagaacattaaagctatattataagcaaagatacgtaaattttgcttatattattatacacatatcatatttctatatttttaagatttggttatataatgtacgtaatgcaaaggaaataaattttatacattattgaacagcgtccaagtaactacattatgtgcactaatagtttagcgtcgtgaagactttattgtgtcgcgaaaagtaaaaattttaaaaattagagcaccttgaacttgcgaaaaaggttctcatcaactgtttaaaaggaggatatcaggtcctatttctgacaaacaatatacaaatttagtttcaaagatgaatcagtgcgcgaaggacataactcatgaagcctccagtatacccatcgatttgcaagaaagatactcgcactggaagaaaaacactaaactactttatgattacctaaacacgaattcaacaaagtggccgtccttaacgtgccagttctttcctgatttagataccacttcggatgagcatcgcatcttgttatcctcatttacatcttcccaaaaacctgaagatgagaccatatatattagcaaaatatccacgttgggtcatataaaatggtcatctttaaataatttcgacatggacgaaatggaattcaaaccggagaactcgacaaggtttccctccaaacacttagtaaatgacatcagtattttcttcccaaacggggaatgcaatagggcaagatatttgcctcaaaatccagatattatagccggcgcctcttcagatggtgcaatctacatattcgatagaacaaaacacggctctactagaataagacagtccaaaatttcacatccctttgagacaaagctgtttggttcacatggtgttattcaagacgtggaggcaatggatacttcttcggcagatataaatgaggcgacttctttagcctggaacttgcagcaggaggccctttt

1. A recombinant microbial host cell comprising a functional or enhanced EDP and an isobutanol production pathway wherein said functional or enhanced EDP provides for increased isobutanol production as compared to the same host cell without said functional or enhanced EDP.

2. The microbial host cell of claim 1 wherein the functional or enhanced EDP is provided by expression of one or more heterologous genes that encode functional EDP pathway enzymes or up-regulation of one or more endogenous genes that encode enhanced EDP pathway enzymes, or both, and one or more modification to said host cell that provides for increased carbon flux through the EDP or reducing equivalents balance such that the cofactors produced during the conversion of glucose to pyruvate are matched with the cofactors required for the conversion of pyruvate to isobutanol, or both, whereby isobutanol production is increased as compared to the same host cell without said one or more modification that provides for increased carbon flux through the EDP or reducing equivalents balance, or both.

3. The microbial host cell of claim 2 wherein said one or more modification to said host cell that provides for increased carbon flux through EDP or reducing equivalents balance, or both, is one or more genetic modification selected from the group consisting of:
a) a disruption in the expression of at least one enzyme of the EMP;
b) a disruption in the expression of at least one enzyme of the PPP; and
c) a modification in any one of EDP, EMP, or PPP such that cofactors produced during the conversion of glucose to pyruvate are matched with the cofactors required for the conversion of pyruvate to isobutanol.

4. The microbial host cell of claim 1, wherein said host cell comprises:
i) at least one gene encoding acetolactate synthase for the conversion of pyruvate to acetolactate;
ii) at least one gene encoding ketol acid reductoisomerase for the conversion of acetolactate to 2,3-dihydroxyisovalerate;
iii) at least one gene encoding an acetohydroxy acid dehydratase for the conversion of 2,3-dihydroxyisovalerate to α-ketoisovalerate;
iv) at least one gene encoding valine dehydrogenase or transaminase for the conversion of α-ketoisovalerate to valine;
v) at least one gene encoding a valine decarboxylase for the conversion of valine to isobutylamine;
vi) at least one gene encoding an omega transaminase for the conversion of isobutylamine to isobutyraldehyde; and
vii) at least one gene encoding a branched chain alcohol dehydrogenase for the conversion of isobutyraldehyde to isobutanol.

5. The microbial host cell of claim 1 wherein said host cell comprises:
i) at least one gene encoding acetolactate synthase for the conversion of pyruvate to acetolactate;
ii) at least one gene encoding ketol acid reductoisomerase for the conversion of acetolactate to 2,3-dihydroxyisovalerate;
iii) at least one gene encoding acetohydroxy acid dehydratase for the conversion of 2,3-dihydroxyisovalerate to α-ketoisovalerate;
iv) at least one gene encoding a branched chain ketoacid dehydrogenase for the conversion of α-ketoisovalerate to isobutyryl-CoA;
v) at least one gene encoding an acylating aldehyde dehydrogenase for the conversion of isobutyryl-CoA to isobutyraldehyde;, and
vi) at least one gene encoding a branched chain aldehyde dehydrogenase for the conversion of isobutyraldehyde to isobutanol.

6. The microbial host cell of claim 1, wherein said host cell comprises:
i) at least one gene encoding acetolactate synthase for the conversion of pyruvate to acetolactate;
ii) at least one gene encoding acetohydroxy acid reductoisomerase for the conversion of acetolactate to 2,3-dihydroxyisovalerate;
iii) at least one gene encoding acetohydroxy acid dehydratase for the conversion of 2,3-dihydroxyisovalerate to α-ketoisovalerate;
iv) at least one gene encoding branched-chain a-keto acid decarboxylase for the conversion of α-ketoisovalerate to isobutyraldehyde; and
v) at least one gene encoding branched-chain alcohol dehydrogenase for the conversion of isobutyraldehyde to isobutanol.

7. The microbial host cell of claim 1 wherein the functional or enhanced EDP is provided by expression of at least one recombinant DNA molecule encoding an enzyme of the EDP selected from the group consisting of
a) glucose-6-phosphate dehydrogenase;
b) 6-phosphogluconolactonase;
c) phosphogluconate dehydratase; and
d) 2-dehydro-3-deoxyphosphogluconate aldolase.

8. The microbial host cell of claim 3 wherein said disruption in expression of at least one enzyme of the EMP is a disruption in expression of at least one enzyme selected from the group consisting of:
a) 6-phosphofructokinase;
b) fructose-bisphosphate aldolase; and
c) glucose-6-phosphate isomerase.

9. The microbial host cell of claim 1 wherein the host cell is a member of the genera Clostridium, Zymomonas, Escherichia, Salmonella, Serratia, Erwinia, Klebsiella, Shigella, Rhodococcus, Pseudomonas, Bacillus, Lactobacillus, Enterococcus, Alcaligenes, Klebsiella, Paenibacillus, Arthrobacter, Corynebacterium, Brevibacterium, Schizosaccharomyces, Kluyveromyces, Yarrowia, Pichia, Candida, Hansenula, or Saccharomyces.

10. The microbial host cell of claim 1 wherein the host cell is E. coli, S. cerevisiae, or L. plantarum.

11. The microbial host cell of claim 9 wherein the host cell is E. coli and wherein the host cell further comprises downregulation or deletion of soluble transhydrogenase activity.

12. The microbial host cell claim 3 wherein the host cell comprises a disruption in at least one of the following genes:
pfk1, pfk2, fba1, gnd1, gnd2, pgi, pfkA, pfkB, fbaA, fbaB, gnd, pgi, sthA, PGI1, PFK1, PFK2, FBA1, GND1, or GND2.

13. A recombinant microbial host cell comprising an isobutanol production pathway and at least one of the following:
a) at least one recombinant DNA molecule encoding an enzyme of the EDP;
b) a disruption in the expression of at least one enzyme of the EMP; or
c) a disruption in the expression of at least one enzyme of the PPP; wherein production of isobutanol by said host cell is enhanced by at least 10% as compared to the same host cell without one of (a)-(c).

14-18. (canceled)

19. A method for the production of isobutanol comprising
a) providing the microbial host cell of claim 1; and
b) contacting the host cell with a fermentable carbon substrate under anaerobic conditions.

20. The method of claim 19 wherein the host cell is E. coli and wherein endogenous pyruvate formate lyase, fumarate reductase, alcohol dehydrogenase, and lactate dehydrogenase activities are downregulated or disrupted.

21. The method of claim 20 wherein the yield of isobutanol is greater than or equal to about 0.3 g/g.

22. The method of claim 20 wherein the yield of isobutanol is greater than or equal to about 0.35 g/g.

23. The method of claim 20 wherein the yield of isobutanol is greater than or equal to about 0.39 g/g.

24. The method of claim 19 wherein the host cell is S. cerevisiae and wherein endogenous pyruvate decarboxylase activity is downregulated or disrupted.

25. The method of claim 19 wherein the host cell is L. plantarum and wherein endogenous lactate dehydrogenase activity is downregulated or disrupted.
